(19) United States
(12) Patent Application Publication
(10) Pub. No.: US 2024/0141308 A1
(43) Pub. Date: May 2, 2024

(54) ORGANOPHOSPHORUS NERVE AGENT HYDROLYZING ENZYMES

(71) Applicant: Ginkgo Bioworks, Inc., Boston, MA (US)

(72) Inventors: David Borhani, Boston, MA (US); Dylan Alexander Carlin, Jamaica Plain, MA (US); Alex Tucker, Boston, MA (US)

(73) Assignee: Ginkgo Bioworks, Inc., Boston, MA (US)

(21) Appl. No.: 18/283,688

(22) PCT Filed: Apr. 15, 2022
(86) PCT No.: PCT/US22/25011

§ 371 Date: Sep. 22, 2023

Related U.S. Application Data
(60) Provisional application No. 63/176,183, filed on Apr. 16, 2021.

(51) Int. Cl. C12N 9/16; A61K 38/46

(52) U.S. Cl. CPC C12N 9/16; A61K 38/465; C12Y 301/08001

(57) ABSTRACT

Aspects of the disclosure relate to phosphotriesterase (PTE) enzymes and PTE-related (PTER) enzymes and their use in hydrolyzing OPNAs.

### CROSS-REFERENCE TO RELATED APPLICATIONS

[0001] This application claims the benefit under 35 U.S.C. § 119(e) of U.S. Provisional Application No. 63/176,183, filed Apr. 16, 2021, entitled “ORGANOPHOSPHORUS NERVE AGENT HYDROLYZING ENZYMES,” the entire disclosure of which is hereby incorporated by reference in its entirety.

### STATEMENT OF GOVERNMENT SUPPORT

[0002] This invention was made with Government support under Contract No. 2014-14031000011 awarded by the Central Intelligence Agency. The Government has certain rights in the invention.

### REFERENCE TO A SEQUENCE LISTING SUBMITTED AS A TEXT FILE VIA EFS-WEB

[0003] The instant application contains a Sequence Listing which has been submitted in ASCII format via EFS-Web and is hereby incorporated by reference in its entirety. The ASCII file, created on Apr. 14, 2022, is named G091970073W000-SEQ-OMJ.txt and is 2,764,019 bytes in size.

### FIELD OF THE INVENTION

[0004] The present disclosure relates to the use of organophosphorus nerve agent hydrolyzing enzymes in the inactivation or elimination of nerve agents such as VX, VR, GB and/or GD by reducing the activity of the nerve agents.

### BACKGROUND

[0005] Chemical Warfare Agents (CWAs) are among the deadliest known weapons of mass destruction (WMD). In particular, organophosphorus nerve agents (OPNAs) are a class of CWAs that act rapidly to cause respiratory arrest and death within minutes of cutaneous absorption or inhalation. Multiple hurdles exist to obtaining prophylactic, post-exposure prophylactic, and therapeutic medical countermeasures to OPNAs, including inadequate efficacy, inadequate kinetic parameters, lack of pan-OPNA activity (against the different stereoisomers of, e.g., V-agents and/or G-agents), high cost, and/or immunogenicity.

### SUMMARY

[0006] Aspects of the disclosure relate to host cells that comprise a heterologous polynucleotide encoding an OPNA hydrolyzing enzyme, wherein the OPNA hydrolyzing enzyme is a phosphotriesterase (PTE), and wherein the PTE comprises a sequence that is at least 90% identical to any one of SEQ ID NOs: 1-4. In some embodiments, the PTE comprises the sequence of any one of SEQ ID NOs: 1-4.

[0007] In some embodiments, the OPNA is a V-agent (such as VX or VR), a G-agent, a VG-agent, an A-agent, an organophosphorus pesticide, or any combination thereof.

[0008] In some embodiments, the host cell is a bacterial cell, an archaebacterial cell, a fungal cell, a yeast cell, an animal cell, a mammalian cell, or a human cell. In some embodiments, the host cell is a bacterial cell. In some embodiments, the bacterial cell is an Escherichia coli (E. coli) cell. In some embodiments, the bacterial cell is a Bacillus cell. In some embodiments, the host cell is a filamentous fungi cell or a yeast cell. In some embodiments, the E. coli cell is an E. coli BL21(DE3) cell.

[0009] In some embodiments, the PTE comprises one or more amino acid substitutions relative to the sequence of any one of SEQ ID NOs: 1-4. In some embodiments, one or more of the amino acid substitutions relative to the sequence of any one of SEQ ID NOs: 1-4 is within the active site of the PTE. In some embodiments, the PTE comprises a sequence that is at least 90% identical to any one of SEQ ID NOs: 36-795. In some embodiments, the PTE comprises the sequence of any one of SEQ ID NOs: 36-795. In some embodiments, the PTE has a K_{cat}/K_{M} value greater than 10⁷ M⁻¹ min⁻¹.

[0010] In some embodiments, the PTE has activity against VX and VR and the PTE comprises one or more of the following amino acid substitutions relative to SEQ ID NO: 1: V25M, I27F, I27M, I27T, V66I, L68N, L68M, L68C, T69S, V70P, V70C, V70T, L144I, A147G, A147F, T148V, T148C, T148M, V164I, S176T, S176M, S176V, S176C, S176Y, S176I, T177C, T179C, T179S, A181P, A181S, A181C, S208T, S208A, G228S, H263M, H263S, H263C, H263T, H263N, A265C, A265T, A265F, A265W, A265M, N266S, N266M, N266T, N266G, N266A, C267A, C267T, C267W, W284D, W284H, W284C, W284N, W284Y, Y286M, and/or Y286W.

[0011] In some embodiments, the PTE has activity against VX and VR and the PTE comprises one or more of the following amino acid substitutions relative to SEQ ID NO: 2: S2K, S2T, S2A, E3K, E3T, E3Q, L4I, L4V, N5R, N5Q, N5M, R8L, R8T, R8C, S10P, D12E, D12P, T13P, T13A, A14S, A14E, A14D, A15D, A15Q, A15E, L16M, V18M, V18I, M28D, T29S, T30S, T30W, T30P, E31G, I32V, I32M, I32W, I32F, A33W, E34Q, N35D, Y36F, Y36W, Y36H, E38D, A39P, W40F, D42N, E43D, D44E, D44N, V47I, V47M, A48E, A48W, D49H, D49W, D49C, D49M, V51I, V51L, K52R, R53Q, R53E, N55K, E56D, E56R, E56Q, L57F, A59E, A59Q, R60A, R60H, D63N, T64S, G72D, Y76N, Y76D, I77V, P78D, P78E, I80L, I80M, I80V, A81R, R82K, R82E, V83L, V83I, A84S, A85E, A85R, E86R, T87S, E88G, L89V, L89M, N90H, I91V, V92I, V93C, T99C, V103W, V103Y, V103H, M105W, Y106F, Y106H, Y106W, F107Y, F107W, F107M, Y109W, Y109F, L110M, L110W, E115D, G118T, G118S, E120D, I121Q, I121E, M122L, M122I, T123A, D124E, V127I, R128H, R128N, Q132D, Q132E, I134V, A135E, A135G, D136G, I139V, K140H, K140R, T150Y, T150S, T150H, P151W, P151H, P151N, P151D, V153I, P155E, P155D, G156W, E158H, A165C, Q166R, H168Q, G182D, L183T, L187H, L187M, L187F, E188W, Q190I, Q190L, K191R, F193L, E194D, E195D, L200P, S201N, R202H, R202K, V203C, V2031, 1214M, G215E, G215D, E219D, L220I, L220M, L220V, I221M, I221C, I221A, A222H, A223R, S225C, Y226W, L227V, L227I, D235C, A236H, A236W, A236K, L238M, L238H, P239S, F240W, F240D, F240Y, E241D, D242E, V244C, N245D, N245E, N245R, T246M, T246L, V247I, V247L, Q249E, Q249W, Q249R, Q249H, M250L, C251I, C251V, E252H, R253N, H255Y, H255W, K258H, K258R, M259I, A271G, L272H, L272W, L272M, D274G, D274W, E275K, V277W, S278R, Q279K, Q279R, Q279H, M281Y, M281F, P282G, N283D, N283G, H285G, L287T, H288F, H288Y, I289L, I289V, H290F, H290L, N291R, N291D, N291T, N291E, D292N, D292R, V293I, I294L, I294V, A296M, K298M, K298R, E299Q, E299K, E299R, R300A, T303S, T303D, D304E, D304Q, E305D, E305A, Q306D, Q306E, L307I, L307V, H308R, H308E, H308N, T309Q, T309K, T309R, L311M, L311F, L311T, V312I, D313E, R316A, R316K, R316Q, R317K, R317N, I318M, I318F, I318L, E320S, E320Q, E320D, Q322R, Q322E, Q322K, A324P, A324S, Y325W, Y325F, Y325H, E326Q, E326R, and/or E326K.

[0012] In some embodiments, the PTE has activity against VX and VR and the PTE comprises one or more of the following amino acid substitutions relative to SEQ ID NO: 3: V25A, V25T, V25I, I27F, I27T, I27M, I27L, L68N, L68P, L68Q, L68M, T69S, V70P, V70C, Y100E, Y100H, Y100D, Y100Q, L144I, C146V, C146I, A147C, T148I, T148A, T148V, V164I, S176L, S176H, S176V, S176C, S176I, S176Y, S176F, T177C, H178D, T179C, A181S, Q189M, Q189V, Q189A, Q189I, Q189C, G206S, S208A, S208T, S208C, G209N, G228S, V260I, S262G, H263M, H263G, H263T, H263Q, A265T, A265S, A265M, A265W, N266L, N266I, N266G, N266T, N266A, N266C, N266Q, C267T, C267W, W284E, and/or W284T.

[0013] In some embodiments, the PTE has activity against VX and VR and the PTE comprises one or more of the following amino acid substitutions relative to SEQ ID NO: 4: L20M, V25L, V25M, F26W, F26H, I27M, I27F, I27V, I27T, V66I, L68N, L68M, L68C, Y98W, F126M, L144I, C146V, A147I, A147G, A147S, A147M, T148M, T148C, T148I, T148V, V164T, V164I, H168S, V173C, S176T, S176M, S176H, H178D, A181S, A181G, Q189M, Q189V, Q189C, I204V, G206S, S208C, S208T, G209N, V260I, S262G, H263S, H263C, H263T, H263N, A265L, A265Q, A265T, A265S, A265Y, A265W, N266C, N266G, N266S, N266T, N266A, C267W, C267A, C267T, C267G, W284H, W284Y, W284M, W284F, W284N, Y286F, Y286M, and/or Y286W.

[0014] In some embodiments, the PTE has activity against VX and the PTE comprises one or more of the following amino acid substitutions relative to SEQ ID NO: 1: 127C, I27Q, I27Y, L68A, S176F, T177L, T179E, G209N, and/or N266W. In some embodiments, the PTE has activity against VX and the PTE comprises one or more of the following amino acid substitutions relative to SEQ ID NO: 2: E38H, I77P, V153W, E188C, L238Y, L276W, and/or A296R. In some embodiments, the PTE has activity against VX and the PTE comprises one or more of the following amino acid substitutions relative to SEQ ID NO: 3: V25C, I27Y, I27C, I27W, I27V, L68A, L73V, N266W, and/or N266H. In some embodiments, the PTE has activity against VX and the PTE comprises one or more of the following amino acid substitutions relative to SEQ ID NO: 4: I27C, T69S, F126C, S176Y, S176I, S176F, T177C, H178Y, Q189L, Q189I, Q189A, and/or S208A. In some embodiments, the PTE has activity against VR and the PTE comprises one or more of the following amino acid substitutions relative to SEQ ID NO: 1: V25I, I27W, K145R, S176H, S208C, G228A, H263F, A265L, W284Q, W284K, W284I, and/or W284R. In some embodiments, the PTE has activity against VR and the PTE comprises one or more of the following amino acid substitutions relative to SEQ ID NO: 3: Y98F, Q189L, G206N, H263F, W284K, and/or W284R. In some embodiments, the PTE has activity against VR and the PTE comprises one or more of the following amino acid substitutions relative to SEQ ID NO: 4: E23D, F26M, H178V, D210C, G228S, A265M, A265C, A265I, A265V, W284C, W284Q, and/or W284R.

[0015] Further aspects of the disclosure relate to methods of treating or protecting against OPNA toxicity, comprising administering to a subject in need thereof a therapeutically effective amount of an OPNA hydrolyzing enzyme, or a polynucleotide encoding an OPNA hydrolyzing enzyme, wherein the OPNA hydrolyzing enzyme is a phosphotriesterase (PTE), and wherein the PTE comprises a sequence that is at least 90% identical to any one of SEQ ID NOs: 1-4.

[0016] Further aspects of the disclosure relate to methods of treating or protecting against OPNA toxicity, comprising administering to a subject in need thereof a cell comprising a heterologous polynucleotide encoding a therapeutically effective amount of an OPNA hydrolyzing enzyme, wherein the OPNA hydrolyzing enzyme is a phosphotriesterase (PTE), and wherein the PTE comprises a sequence that is at least 90% identical to any one of SEQ ID NOs: 1-4. In some embodiments, the cell is a human cell, an animal cell, a yeast cell, or a bacterial cell.

[0017] Further aspects of the disclosure relate to methods of hydrolyzing or degrading an OPNA, comprising contacting an OPNA with an OPNA hydrolyzing enzyme, wherein the OPNA hydrolyzing enzyme is a phosphotriesterase (PTE), and wherein the PTE comprises a sequence that is at least 90% identical to any one of SEQ ID NOs: 1-4. Further aspects of the disclosure relate to methods of hydrolyzing or degrading an OPNA, comprising contacting an OPNA with a cell comprising a heterologous polynucleotide encoding an OPNA hydrolyzing enzyme, wherein the OPNA hydrolyzing enzyme is a phosphotriesterase (PTE), wherein the PTE comprises a sequence that is at least 90% identical to any one of SEQ ID NOs: 1-4, and wherein the cell is in a solution, in a sprayable form, in dried form, or in immobilized form.

[0018] In some embodiments, the cell is an archaebacterium cell or a soil bacterium cell, such as a Bacillus cell. In some embodiments, the PTE comprises the sequence of any one of SEQ ID NOs: 1-4. In some embodiments, the OPNA is a V-agent (such as VX or VR), a G-agent, a VG-agent, an A-agent, an organophosphorus pesticide, or any combination thereof.

[0019] In some embodiments, the PTE is recombinantly produced. In some embodiments, the PTE is recombinantly produced in a bacterial cell or archaebacterial cell. In some embodiments, the bacterial cell is an E. coli cell. In some embodiments, the bacterial cell is a Bacillus cell. In some embodiments, the PTE is recombinantly produced in a filamentous fungi cell or a yeast cell. In some embodiments, the E. cell is an E. coli BL21(DE3) cell. In some embodiments, the PTE comprises one or more amino acid substitutions relative to the sequence of any one of SEQ ID NOs: 1-4. In some embodiments, one or more of the amino acid substitutions relative to the sequence of any one of SEQ ID NOs: 1-4 is within the active site of the PTE. In some embodiments, the PTE comprises a sequence that is at least 90% identical to any one of SEQ ID NOs: 36-795. In some embodiments, the PTE comprises the sequence of any one of SEQ ID NOs: 36-795. In some embodiments, the PTE has a K_{cat}/K_{M} value greater than 10⁷ M⁻¹ min⁻¹.

[0020] In some embodiments, the PTE is applied to an article of clothing. In some embodiments, the method is a method of protecting a subject against exposure to an OPNA. In some embodiments, the method is a method of treating a subject that has been exposed to an OPNA.

[0021] Further aspects of the disclosure relate to OPNA hydrolyzing enzymes, wherein the OPNA hydrolyzing enzyme is a PTE, wherein the PTE comprises a sequence that is at least 90% identical to any one of SEQ ID NOs: 1-4, and wherein the sequence comprises one or more amino acid substitutions relative to the sequence of any one of SEQ ID NOs: 1-4.

[0022] In some embodiments, one or more of the amino acid substitutions relative to the sequence of any one of SEQ ID NOs: 1-4 is within the active site of the PTE. In some embodiments, the OPNA is a V-agent (such as VX or VR), a G-agent, a VG-agent, an A-agent, an organophosphorus pesticide, or any combination thereof. In some embodiments, the PTE is recombinantly produced.

[0023] In some embodiments, the PTE is recombinantly produced in a bacterial cell or an archaebacterial cell. In some embodiments, the bacterial cell is an E. coli cell. In some embodiments, the bacterial cell is a Bacillus cell. In some embodiments, the PTE is recombinantly produced in a filamentous fungi cell or a yeast cell. In some embodiments, the E. cell is an E. coli BL21(DE3) cell.

[0024] In some embodiments, the PTE comprises a sequence that is at least 90% identical to any one of SEQ ID NOs: 36-795. In some embodiments, the PTE comprises the sequence of any one of SEQ ID NOs: 36-795. In some embodiments, the PTE has a k_{cat}/K_{M} value greater than 107 M⁻¹ min⁻¹.

[0025] In some embodiments, the OPNA hydrolyzing enzyme has activity against VX and VR and the OPNA hydrolyzing enzyme comprises one or more of the following amino acid substitutions relative to SEQ ID NO: 1: V25M, I27F, I27M, I27T, V66I, L68N, L68M, L68C, T69S, V70P, V70C, V70T, L144I, A147G, A147F, T148V, T148C, T148M, V164I, S176T, S176M, S176V, S176C, S176Y, S176I, T177C, T179C, T179S, A181P, A181S, A181C, S208T, S208A, G228S, H263M, H263S, H263C, H263T, H263N, A265C, A265T, A265F, A265W, A265M, N266S, N266M, N266T, N266G, N266A, C267A, C267T, C267W, W284D, W284H, W284C, W284N, W284Y, Y286M, and/or Y286W.

[0026] In some embodiments, the OPNA hydrolyzing enzyme has activity against VX and VR and the OPNA hydrolyzing enzyme comprises one or more of the following amino acid substitutions relative to SEQ ID NO: 2: S2K, S2T, S2A, E3K, E3T, E3Q, L4I, L4V, N5R, N5Q, N5M, R8L, R8T, R8C, S10P, D12E, D12P, T13P, T13A, A14S, A14E, A14D, A15D, A15Q, A15E, L16M, V18M, V18I, M28D, T29S, T30S, T30W, T30P, E31G, I32V, I32M, I32W, I32F, A33W, E34Q, N35D, Y36F, Y36W, Y36H, E38D, A39P, W40F, D42N, E43D, D44E, D44N, V47I, V47M, A48E, A48W, D49H, D49W, D49C, D49M, V51I, V51L, K52R, R53Q, R53E, N55K, E56D, E56R, E56Q, L57F, A59E, A59Q, R60A, R60H, D63N, T64S, G72D, Y76N, Y76D, I77V, P78D, P78E, I80L, I80M, I80V, A81R, R82K, R82E, V83L, V83I, A84S, A85E, A85R, E86R, T87S, E88G, L89V, L89M, N90H, I91V, V92I, V93C, T99C, V103W, V103Y, V103H, M105W, Y106F, Y106H, Y106W, F107Y, F107W, F107M, Y109W, Y109F, L110M, L110W, E115D, G118T, G118S, E120D, I121Q, I121E, M122L, M122I, T123A, D124E, V127I, R128H, R128N, Q132D, Q132E, I134V, A135E, A135G, D136G, I139V, K140H, K140R, T150Y, T150S, T150H, P151W, P151H, P151N, P151D, V153I, P155E, P155D, G156W, E158H, A165C, Q166R, H168Q, G182D, L183T, L187H, L187M, L187F, E188W, Q190I, Q190L, K191R, F193L, E194D, E195D, L200P, S201N, R202H, R202K, V203C, V2031, 1214M, G215E, G215D, E219D, L220I, L220M, L220V, I221M, I221C, I221A, A222H, A223R, S225C, Y226W, L227V, L227I, D235C, A236H, A236W, A236K, L238M, L238H, P239S, F240W, F240D, F240Y, E241D, D242E, V244C, N245D, N245E, N245R, T246M, T246L, V247I, V247L, Q249E, Q249W, Q249R, Q249H, M250L, C251I, C251V, E252H, R253N, H255Y, H255W, K258H, K258R, M259I, A271G, L272H, L272W, L272M, D274G, D274W, E275K, V277W, S278R, Q279K, Q279R, Q279H, M281Y, M281F, P282G, N283D, N283G, H285G, L287T, H288F, H288Y, I289L, I289V, H290F, H290L, N291R, N291D, N291T, N291E, D292N, D292R, V293I, I294L, I294V, A296M, K298M, K298R, E299Q, E299K, E299R, R300A, T303S, T303D, D304E, D304Q, E305D, E305A, Q306D, Q306E, L307I, L307V, H308R, H308E, H308N, T309Q, T309K, T309R, L311M, L311F, L311T, V312I, D313E, R316A, R316K. R316Q, R317K, R317N, I318M, I318F, I318L, E320S, E320Q, E320D, Q322R, Q322E, Q322K, A324P, A324S, Y325W, Y325F, Y325H, E326Q, E326R, and/or E326K.

[0027] In some embodiments, the OPNA hydrolyzing enzyme has activity against VX and VR and the OPNA hydrolyzing enzyme comprises one or more of the following amino acid substitutions relative to SEQ ID NO: 3: V25A, V25T, V25I, I27F, I27T, I27M, I27L, L68N, L68P, L68Q, L68M, T69S, V70P, V70C, Y100E, Y100H, Y100D, Y100Q, L144I, C146V, C146I, A147C, T148I, T148A, T148V, V164I, S176L, S176H, S176V, S176C, S176I, S176Y, S176F, T177C, H178D, T179C, A181S, Q189M, Q189V, Q189A, Q189I, Q189C, G206S, S208A, S208T, S208C, G209N, G228S, V260I, S262G, H263M, H263G, H263T, H263Q, A265T, A265S, A265M, A265W, N266L, N266I, N266G, N266T, N266A, N266C, N266Q, C267T, C267W, W284E, and/or W284T.

[0028] In some embodiments, the OPNA hydrolyzing enzyme has activity against VX and VR and the OPNA hydrolyzing enzyme comprises one or more of the following amino acid substitutions relative to SEQ ID NO: 4: L20M, V25L, V25M, F26W, F26H, I27M, I27F, I27V, I27T, V66I, L68N, L68M, L68C, Y98W, F126M, L144I, C146V, A147I, A147G, A147S, A147M, T148M, T148C, T148I, T148V, V164T, V164I, H168S, V173C, S176T, S176M, S176H, H178D, A181S, A181G, Q189M, Q189V, Q189C, I204V, G206S, S208C, S208T, G209N, V260I, S262G, H263S, H263C, H263T, H263N, A265L, A265Q, A265T, A265S, A265Y, A265W, N266C, N266G, N266S, N266T, N266A, C267W, C267A, C267T, C267G, W284H, W284Y, W284M, W284F, W284N, Y286F, Y286M, and/or Y286W.

[0029] In some embodiments, the OPNA hydrolyzing enzyme has activity against VX and the OPNA hydrolyzing enzyme comprises one or more of the following amino acid substitutions relative to SEQ ID NO: 1: I27C, I27Q, I27Y, L68A, S176F, T177L, T179E, G209N, and/or N266W. In some embodiments, the OPNA hydrolyzing enzyme has activity against VX and the OPNA hydrolyzing enzyme comprises one or more of the following amino acid substitutions relative to SEQ ID NO: 2: E38H, I77P, V153W, E188C, L238Y, L276W, and/or A296R. In some embodiments, the OPNA hydrolyzing enzyme has activity against VX and the OPNA hydrolyzing enzyme comprises one or more of the following amino acid substitutions relative to SEQ ID NO: 3: V25C, I27Y, I27C, I27W, I27V, L68A, L73V, N266W, and/or N266H. In some embodiments, the OPNA hydrolyzing enzyme has activity against VX and the OPNA hydrolyzing enzyme comprises one or more of the following amino acid substitutions relative to SEQ ID NO: 4: I27C, T69S, F126C, S176Y, S176I, S176F, T177C, H178Y, Q189L, Q189I, Q189A, and/or S208A. In some embodiments, the OPNA hydrolyzing enzyme has activity against VR and the OPNA hydrolyzing enzyme comprises one or more of the following amino acid substitutions relative to SEQ ID NO: 1: V25I, I27W, K145R, S176H, S208C, G228A, H263F, A265L, W284Q, W284K, W284I, and/or W284R. In some embodiments, the OPNA hydrolyzing enzyme has activity against VR and the OPNA hydrolyzing enzyme comprises one or more of the following amino acid substitutions relative to SEQ ID NO: 3: Y98F, Q189L, G206N, H263F, W284K, and/or W284R. In some embodiments, the OPNA hydrolyzing enzyme has activity against VR and the OPNA hydrolyzing enzyme comprises one or more of the following amino acid substitutions relative to SEQ ID NO: 4: E23D, F26M, H178V, D210C, G228S, A265M, A265C, A265I, A265V, W284C, W284Q, and/or W284R.

[0030] Further aspects of the disclosure relate to host cells that comprise a heterologous polynucleotide encoding an OPNA hydrolyzing enzyme, wherein the OPNA hydrolyzing enzyme comprises a sequence that is at least 90% identical to any one of SEQ ID NOs: 6 and 796-956. In some embodiments, the OPNA hydrolyzing enzyme comprises the sequence of any one of SEQ ID NOs: 6 and 796-956.

[0031] In some embodiments, the OPNA is a V-agent (such as VX or VR), a G-agent, a VG-agent, an A-agent, an organophosphorus pesticide, or any combination thereof. In some embodiments, the host cell is a bacterial cell, an archaebacterial cell, a fungal cell, a yeast cell, an animal cell, a mammalian cell, or a human cell. In some embodiments, the host cell is a bacterial cell. In some embodiments, the bacterial cell is an Escherichia coli (E. coli) cell. In some embodiments, the bacterial cell is a Bacillus cell. In some embodiments, the host cell is a filamentous fungi cell or a yeast cell. In some embodiments, the E. coli cell is an E. coli BL21(DE3) cell. In some embodiments, the PTE has a K_{cat}/K_{M} value greater than 10⁷ M⁻¹ min⁻¹.

[0032] Further aspects of the disclosure relate to methods of treating or protecting against OPNA toxicity, comprising administering to a subject in need thereof a therapeutically effective amount of an OPNA hydrolyzing enzyme, or a polynucleotide encoding an OPNA hydrolyzing enzyme, wherein the OPNA hydrolyzing enzyme comprises a sequence that is at least 90% identical to any one of SEQ ID NOs: 6 and 796-956.

[0033] Further aspects of the disclosure relate to methods of hydrolyzing or degrading an OPNA, comprising administering to a subject in need thereof a cell comprising a heterologous polynucleotide encoding a therapeutically effective amount of an OPNA hydrolyzing enzyme, wherein the OPNA hydrolyzing enzyme comprises a sequence that is at least 90% identical to any one of SEQ ID NOs: 6 and 796-956. In some embodiments, the cell is a human cell, an animal cell, a yeast cell, or a bacterial cell.

[0034] Further aspects of the disclosure relate to methods of hydrolyzing or degrading an OPNA, comprising contacting an OPNA with an OPNA hydrolyzing enzyme, wherein the OPNA hydrolyzing enzyme comprises a sequence that is at least 90% identical to any one of SEQ ID NOs: 6 and 796-956.

[0035] Further aspects of the disclosure relate to methods of hydrolyzing or degrading an OPNA, comprising contacting an OPNA with a cell comprising a heterologous polynucleotide encoding an OPNA hydrolyzing enzyme, wherein the OPNA hydrolyzing enzyme comprises a sequence that is at least 90% identical to any one of SEQ ID NOs: 6 and 796-956 and wherein the cell is in a solution, in a sprayable form, in dried form, or in immobilized form. In some embodiments, the cell is an archaebacterium cell or a soil bacterium cell, such as a Bacillus cell.

[0036] Further aspects of the disclosure relate to an OPNA hydrolyzing enzyme, wherein the OPNA hydrolyzing enzyme comprises a sequence that is at least 90% identical to any one of SEQ ID NOs: 6 and 796-956. In some embodiments, the OPNA hydrolyzing enzyme comprises one or more amino acid substitutions relative to the sequence of SEQ ID NO: 6.

[0037] In some embodiments, the OPNA hydrolyzing enzyme has activity against VX and VR and the OPNA hydrolyzing enzyme comprises the following amino acid substitution relative to SEQ ID NO: 6: 1258V. In some embodiments, the OPNA hydrolyzing enzyme has activity against VR and the OPNA hydrolyzing enzyme comprises the following amino acid substitution relative to SEQ ID NO: 6: G229N. In some embodiments, the PTE has activity against GB and GD and the PTE comprises one or more of the following amino acid substitutions relative to SEQ ID NO: 1: A265Y, N266G, N266M, C267W, and/or W284H. In some embodiments, the PTE has activity against GB and GD and the PTE comprises one or more of the following amino acid substitutions relative to SEQ ID NO: 2: T29S, T99C, V103H, P151W, A236K, L272C, L272W, M281Y, and/or H285G. In some embodiments, the PTE has activity against GB and GD and the PTE comprises one or more of the following amino acid substitutions relative to SEQ ID NO: 3: Y100D, A265Y, N266I, N266L, and/or W284H.

[0038] In some embodiments, the PTE has activity against GB and GD and the PTE comprises one or more of the following amino acid substitutions relative to SEQ ID NO: 4: T148V, A265M, A265Y, N266T, C267W, and/or W284H. In some embodiments, the PTE has activity against VX, VR, GB, and GD and the PTE comprises one or more of the following amino acid substitutions relative to SEQ ID NO: 1: A265Y, N266M, and/or C267W. In some embodiments, the PTE has activity against VX, VR, GB, and GD and the PTE comprises one or more of the following amino acid substitutions relative to SEQ ID NO: 2: T99C, V103H, P151W, L272C, and/or L272W. In some embodiments, the PTE has activity against VX, VR, GB, and GD and the PTE comprises one or more of the following amino acid substitutions relative to SEQ ID NO: 3: A265Y, N266I, and/or N266L. In some embodiments, the PTE has activity against VR, GB, and GD and the PTE comprises the following amino acid substitution relative to SEQ ID NO: 1: W284H. In some embodiments, the PTE has activity against VR and GD and the PTE comprises the following amino acid substitution relative to SEQ ID NO: 1: A265Y. In some embodiments, the PTE has activity against VX, VR and GD and the PTE comprises the following amino acid substitution relative to SEQ ID NO: 1: A265Y. In some embodiments, the PTE has activity against VX, VR and GB and the PTE comprises one or more of the following amino acid substitutions relative to SEQ ID NO: 1: C267W and/or N266G. In some embodiments, the PTE has activity against VX, VR and GB and the PTE comprises one or more of the following amino acid substitutions relative to SEQ ID NO: 2: T99C, L272C, and/or L272W. In some embodiments, the PTE has activity against VX, VR and GB and the PTE comprises one of the following amino acid substitutions relative to SEQ ID NO: 3: N266I or N266L.

[0039] In some embodiments, the PTE has activity against VX and/or VR. In some embodiments, the PTE has activity against GB and/or GD. In some embodiments, the PTE has activity against VX, VR, GB, and GD.

[0040] In some embodiments, the OPNA hydrolyzing enzyme has activity against GB and GD and the OPNA hydrolyzing enzyme comprises one or more of the following amino acid substitutions relative to SEQ ID NO: 1: A265Y, N266G, N266M, C267W, and/or W284H. In some embodiments, the OPNA hydrolyzing enzyme has activity against GB and GD and the OPNA hydrolyzing enzyme comprises one or more of the following amino acid substitutions relative to SEQ ID NO: 2: T29S, T99C, V103H, P151W, A236K, L272C, L272W, M281Y, and/or H285G.

[0041] In some embodiments, the OPNA hydrolyzing enzyme has activity against GB and GD and the OPNA hydrolyzing enzyme comprises one or more of the following amino acid substitutions relative to SEQ ID NO: 3: Y100D, A265Y, N266I, N266L, and/or W284H. In some embodiments, the OPNA hydrolyzing enzyme has activity against GB and GD and the OPNA hydrolyzing enzyme comprises one or more of the following amino acid substitutions relative to SEQ ID NO: 4: T148V, A265M, A265Y, N266T, C267W, and/or W284H.

[0042] In some embodiments, the OPNA hydrolyzing enzyme has activity against VX, VR, GB, and GD and the OPNA hydrolyzing enzyme comprises one or more of the following amino acid substitutions relative to SEQ ID NO: 1: A265Y, N266M, and/or C267W.

[0043] In some embodiments, the OPNA hydrolyzing enzyme has activity against VX, VR, GB, and GD and the OPNA hydrolyzing enzyme comprises one or more of the following amino acid substitutions relative to SEQ ID NO: 2: T99C, V103H, P151W, L272C, and/or L272W. In some embodiments, the OPNA hydrolyzing enzyme has activity against VX, VR, GB, and GD and the OPNA hydrolyzing enzyme comprises one or more of the following amino acid substitutions relative to SEQ ID NO: 3: A265Y, N266I, and/or N266L. In some embodiments, the OPNA hydrolyzing enzyme has activity against VR, GB, and GD and the OPNA hydrolyzing enzyme comprises the following amino acid substitution relative to SEQ ID NO: 1: W284H. In some embodiments, the OPNA hydrolyzing enzyme has activity against VR and GD and the OPNA hydrolyzing enzyme comprises the following amino acid substitution relative to SEQ ID NO: 1: A265Y. In some embodiments, the OPNA hydrolyzing enzyme has activity against VX, VR and GD and the OPNA hydrolyzing enzyme comprises the following amino acid substitution relative to SEQ ID NO: 1: A265Y. In some embodiments, the OPNA hydrolyzing enzyme has activity against VX, VR and GB and the OPNA hydrolyzing enzyme comprises one or more of the following amino acid substitutions relative to SEQ ID NO: 1: C267W and/or N266G. In some embodiments, the OPNA hydrolyzing enzyme has activity against VX, VR and GB and the OPNA hydrolyzing enzyme comprises one or more of the following amino acid substitutions relative to SEQ ID NO: 2: T99C, L272C, and/or L272W. In some embodiments, the OPNA hydrolyzing enzyme has activity against VX, VR and GB and the OPNA hydrolyzing enzyme comprises one of the following amino acid substitutions relative to SEQ ID NO: 3: N266I or N266L.

[0044] Each of the limitations of the invention can encompass various embodiments of the invention. It is, therefore, anticipated that each of the limitations of the invention involving any one element or combinations of elements can be included in each aspect of the invention. This invention is not limited in its application to the details of construction and the arrangement of components set forth in the following description or illustrated in the drawings. The invention is capable of other embodiments and of being practiced or of being carried out in various ways. Also, the phraseology and terminology used in this disclosure is for the purpose of description and should not be regarded as limiting. The use of “including,” “comprising,” or “having,” “containing,” “involving,” and variations of thereof in this disclosure, is meant to encompass the items listed thereafter and equivalents thereof as well as additional items. As used in this specification and the appended claims, the singular forms “a,” “an” and “the” include plural referents unless the content clearly dictates otherwise.

### BRIEF DESCRIPTION OF THE DRAWINGS

[0045] The following drawings form part of the present specification and are included to further demonstrate certain aspects of the present disclosure, which may be better understood by reference to one or more of these drawings in combination with the detailed description of specific embodiments presented in this disclosure. The accompanying drawings are not intended to be drawn to scale. The drawings are illustrative only and are not required for enablement of the disclosure. For purposes of clarity, not every component may be labeled in every drawing. In the drawings:

[0046] FIG. 1 is a schematic depicting a representative expression construct for bacterial expression of StrepII protein purification-tagged PTEs. The expression construct was 4,348 bp.

[0047] FIG. 2 depicts graphs showing purification and cryopreservation conditions on a representative set of PTEs. The least square means plots show the following freezing conditions: flash freeze, flash freeze+50 mM trehalose, and no treatment; and the presence or absence (false or true) of metals in purification.

[0048] FIGS. 3A-3B depict graphs showing screening activity data of PTE hydrolytic activity on VR and VX substrates based on an activity assay using purified PTEs. FIG. 3A depicts data from a primary screen. Library members are represented as open shapes: open squares (strain t402076), open triangles (strain t402353), open inverted triangles (strain t401393), open diamonds (strain t402181), and open circles (strains t402287, t402121, t401421, t401451, t402024, t402094, and t402397). Strain t401992 (filled circles) was used as a positive control and for determining hit ranking of the library members. Strain t402006 (filled triangles), expressing an engineered PTE, B. diminuta variant G1-C74 described in Cherney et al. (2013) ACS Chemical Biology, 8(11), 2394-2403, was also used as a positive control. Strain t339870 (filled square), expressing GFP, was used as a negative control. FIG. 3A shows the plotting of two bioreplicates in all cases except t339870, where the filled square represents the average of 34 bioreplicates. FIG. 3B depicts data from a secondary screen. Library members are represented as open shapes: open squares (strain t402076), open triangles (strain t402353), open inverted triangles (strain t401393), and open diamonds (strain t402181). Strain t339870 (filled square), expressing GFP, was used as a negative control. The data show the average of three bioreplicates and error bars representing standard deviation.

[0049] FIGS. 4A-4B depict graphs showing screening activity data of PTE hydrolytic activity on GB and GD substrates based on an activity assay using purified PTEs. FIG. 4A depicts data from a screen including positive controls. GB percent activity and GD percent activity were measured by the residual acetylcholinesterase activity. Library members are represented as open triangles. An uninhibited sample comprising no G-agent (filled inverted triangle) was used as a positive control and for normalizing data derived from each library member and control strain. Strain t402006 (filled triangle) was used as a positive G-agent hydrolase control. A sample comprising no G-agent degrading protein (filled square) was used as a negative control. FIG. 4B depicts a higher resolution plot of the data depicted in FIG. 4A. Library members are represented as open triangles. Strain t339870 (filled circle) comprising GFP but no G-agent degrading protein and was used as a negative control. A sample comprising no G-agent degrading protein (filled square) was also used as a negative control.

[0050] FIG. 5 depicts a graph showing the V-agent hydrolyzing activity of strains tested in Example 5. Strain t339870 comprising GFP but no V-agent degrading protein and was used as a negative control. VR and VX activity values were measured in mOD412/min/μg.

[0051] FIG. 6 depicts a graph showing the G-agent hydrolyzing activity of strains tested in Example 6. Strain t339870 comprising GFP but no G-agent degrading protein and was used as a negative control. Strain t402006 was used as a positive G-agent hydrolase control. GD activity values were measured as residual acetylcholinesterase activity.

[0052] FIGS. 7A-7B depict graphs showing activity data of PTE hydrolytic activity on GB and GD substrates based on an activity assay using purified PTEs. FIGS. 7A-7B specifically show the G-agent hydrolyzing activity of top strains that also exhibit V-agent hydrolyzing activity. FIG. 7A depicts data from a screen including negative controls. GB percent activity and GD percent activity are measured by the residual acetylcholinesterase activity. Library members are represented as open triangles. Strain t339870 (filled circle) comprises GFP but no G-agent degrading protein and was used as a negative control. A sample comprising no G-agent degrading protein (filled square) was also used as a negative control. FIG. 7B depicts the same data as FIG. 7A but on a log-log plot.

[0053] FIG. 8 depicts a graph showing activity data of PTE hydrolytic activity on VX and GD substrates based on an activity assay using purified PTEs. Library members are represented as open triangles. Strain t339870 (filled circle) comprises GFP but no G-agent degrading protein and was used as a negative control. A sample comprising no G-agent degrading protein (filled square) was also used as a negative control. An uninhibited sample comprising no G-agent (filled inverted triangle) was used as a positive control and for normalizing G-agent hydrolysis data derived from each library member and control strain. Strain t402006 (filled triangle) was used as a positive G-agent hydrolase control. VX activity values were measured in mOD412/min/μg. GD percent activity was measured by the residual acetylcholinesterase activity.

[0054] FIG. 9 depicts a graph showing activity data of PTE hydrolytic activity on VR and GD substrates based on an activity assay using purified PTEs. An uninhibited sample comprising no G-agent (filled inverted triangle) was used as a positive control and for normalizing G-agent hydrolysis data derived from each library member and control strain. Strain t402006 (filled triangle) was used as a positive G-agent hydrolase control. VR activity values were measured in mOD412/min/μg. GD percent activity was measured by the residual acetylcholinesterase activity.

[0055] FIG. 10 depicts a graph showing activity data of PTE hydrolytic activity on VX and GB substrates based on an activity assay using purified PTEs. An uninhibited sample comprising no G-agent (filled inverted triangle) was used as a positive control and for normalizing G-agent hydrolysis data derived from each library member and control strain. Strain t402006 (filled triangle) was used as a positive G-agent hydrolase control. VX activity values were measured in mOD412/min/μg. GB percent activity was measured by the residual acetylcholinesterase activity.

[0056] FIG. 11 depicts a graph showing activity data of PTE hydrolytic activity on VR and GB substrates based on an activity assay using purified PTEs. An uninhibited sample comprising no G-agent (filled inverted triangle) was used as a positive control and for normalizing G-agent hydrolysis data derived from each library member and control strain. Strain t402006 (filled triangle) was used as a positive G-agent hydrolase control. VR activity values were measured in mOD412/min/μg. GB percent activity was measured by the residual acetylcholinesterase activity.

### DETAILED DESCRIPTION OF THE INVENTION

[0057] This disclosure provides identification and production of organophosphorus nerve agent (OPNA) hydrolyzing enzymes using genetically modified host cells. For example, the OPNA hydrolyzing enzymes described in this disclosure can be used for degrading OPNAs, reducing the harmful effects of OPNAs, and/or hydrolyzing OPNAs. This disclosure describes recombinant production of OPNA hydrolyzing enzymes in host cells and the use of recombinantly produced OPNA hydrolyzing enzymes, polynucleotides encoding OPNA hydrolyzing enzymes, and/or cells comprising a heterologous polynucleotide encoding OPNA hydrolyzing enzymes for, e.g., administration to human subjects, or incorporation into or coating of materials, such as clothing or textile, or incorporation into or spraying onto other materials, such as dirt or water.

### Organophosphorus Nerve Agents (OPNA)

[0058] Organophosphorus compounds are organic chemicals derived from phosphoric, phosphonic, or phosphinic acids and their derivatives. Organophosphorus compounds include nerve agents, i.e., organophosphorus nerve agents (OPNAs), which are a class of chemical compounds that act rapidly to cause respiratory arrest and death within minutes of cutaneous absorption or inhalation or ingestion. Certain OPNAs are used as chemical warfare agents (CWAs). OPNAs are also extensively used worldwide as pesticides, which can cause great hazards to human health. Terrorist attacks employing OPNAs, as well as accidental exposure to or intentional poisonings employing prevalent OPNA pesticides such as chlorpyriphos, malathion, fenitrothion, and monocrotophos present significant risks to human health worldwide.

[0059] OPNAs can be generally classified into five types: (1) G-agents; (2) V-agents, where “V” stands for venomous; (3) GV-agents, which have the combined properties of both G-agents and V-agents; (4) A-agents, also known as Novichok agents; and (5) organophosphorus pesticides. The first four types have been developed primarily for use as and/or used as CWAs. G-agents include, but are not limited to, tabun (GA), sarin (GB), soman (GD), and cyclosarin (GF). V-agents include, but are not limited to, CVX (also known as Chinese VX), VE, VG, VM, VR (also known as Russian VX), and VX. GV-agents include, but are not limited to GV itself, namely 2-dimethylaminoethyl-(dimethylamido)-fluorophosphate. A-agents include but are not limited to, substance-33, A-230, A-232, and A-234. Novichok-5 and Novichok-7 each comprise so-called “binary munitions,” that is two chemical compounds that, when mixed, form A-232 and A-234, respectively. Organophosphorus pesticides include, but are not limited to, parathion, chlorpyriphos, malathion, fenitrothion, and monocrotophos. The types and toxicity of OPNAs are further described, for example, in Mukherjee and Gupta (Organophosphorus Nerve Agents: Types, Toxicity, and Treatments; Journal of Toxicology, (2020) Article ID 3007984), which is incorporated by reference in its entirety.

[0060] The V-agents VX, O-ethyl S-(2-diisopropylaminoethyl) methylphosphonothiolate, and VR, O-isobutyl S-[2-(diethylamino)ethyl] methylphosphonothiolate, are among the most potent and dangerous OPNAs. The chemical structures of VX and VR are shown below:

[chemical structure]

[0061] The V-agent VE is also known as O-ethyl S-[2-(diethylamino)ethyl]ethylphosphonothiolate. The V-agent VG is also known as 0,0-iethyl S-[2-(diethylamino)ethyl] phosphorothiolate. The V-agent VM is also known as O-ethyl S-[2-(diethylamino)ethyl] methylphosphonothiolate.

[0062] The G-agents GB, Propan-2-yl-methylphosphonofluoridate (also known as “Sarin”), and GD, 0-pinacolyl methylphosphonofluoridate (also known as “Soman”), are extremely toxic and, like VX and VR, are among the most potent and dangerous OPNAs. The chemical structures of GB and GD are shown below:

[chemical structure]

[0063] The extreme toxicity of OPNAs largely derives from their ability to irreversibly inhibit acetylcholinesterase (AChE), a vital enzyme that catalyzes the breakdown of the excitatory neurotransmitter acetylcholine (ACh). AChE inhibition by OPNAs leads to ACh buildup at neuronal synapses, at neuromuscular junctions, and in the bloodstream. This ACh excess causes debilitating symptoms including the continuous transmission of excitatory nerve impulses and the resulting involuntary muscle contractions, constriction of pupils, profuse salivation, lacrimation, urination, defecation, gastrointestinal distress, emesis, convulsions, and possibly death. ACh binding at nicotinic receptors results in muscle fasciculations, cramps, weakness, paralysis, and areflexia. ACh can also stimulate the brain where it can induce seizures and coma. OPNA exposure often results in long-term neuropsychiatric sequelae, including disturbances in memory, sleep, and vigilance; depression; anxiety and irritability; and intellectual deficits. Nerve agent toxicity affects all organ systems leading to a multitude of signs and symptoms quickly after exposure.

[0064] Currently, no prophylactic effective medical countermeasures (MCMs) are FDA-approved for the prevention of the effects of OPNA intoxication. Approved pretreatments (pyridostigmine bromide) and post-exposure countermeasures (atropine, 2-PAM, and diazepam) do not effectively prevent or mitigate all symptoms of intoxication, especially long-term neuropsychiatric sequelae. Prophylactic and therapeutic MCMs that are currently in development, such as human butyrylcholinesterase (BChE), a stoichiometric pan-OPNA neutralizer, and bacterial OPNA-degrading enzymes, all exhibit one or more deficiencies. Such deficiencies include but are not limited to: 1) kinetic parameters inadequate to neutralize OPNAs prior to AChE inhibition; 2) inadequate activity against multiple OPNA classes (e.g., G-agents, V-agents, A-agents, and others); 3) low bioavailability and inadequate pharmacokinetics (PK); 4) immunogenicity, which results in the elicitation of neutralizing antibody and/or anaphylaxis-provoking responses upon repeated dosing; 5) inconvenient routes of administration; 6) scale-up and manufacturing issues; and 7) high cost.

### OPNA Hydrolyzing Enzymes

[0065] Methods and compositions described in this disclosure include OPNA hydrolyzing enzymes. As used in the present disclosure, “an OPNA hydrolyzing enzyme” (which is used interchangeably in this disclosure with “OPNA degrading enzyme”) refers to an enzyme that is capable of, directly or indirectly, hydrolyzing, impacting and/or decreasing the level and/or activity of one or more OPNAs.

[0066] In some embodiments, an OPNA hydrolyzing enzyme is a V-agent hydrolyzing enzyme and/or a G-agent hydrolyzing enzyme. As used in the present disclosure, a “V-agent hydrolyzing enzyme” (which is used interchangeably in this disclosure with “V-agent degrading enzyme”) refers to an enzyme that is capable of, directly or indirectly, hydrolyzing, impacting and/or decreasing the level and/or activity of one or more V-agents. In some embodiments, the V-agent is VX. In some embodiments, the V-agent is VR. As used in the present disclosure, a “G-agent hydrolyzing enzyme” (which is used interchangeably in this disclosure with “G-agent degrading enzyme”) refers to an enzyme that is capable of, directly or indirectly, hydrolyzing, impacting and/or decreasing the level and/or activity of one or more G-agents. In some embodiments, the G-agent is GB. In some embodiments, the G-agent is GD.

[0067] An OPNA hydrolyzing enzyme, V-agent hydrolyzing enzyme, and/or G-agent hydrolyzing enzyme associated with the disclosure may be a phosphotriesterase (PTE) (EC. 3.1.8.1). As used in this disclosure, a “phosphotriesterase” or “PTE” refers to a metalloenzyme that is capable of hydrolyzing an ester linkage in an organophosphate, an organophosphonate, and/or an organophosphinate. PTEs cleave a labile ester bond of the organophosphate, the organophosphonate, and/or the organophosphinate, and this reaction neutralizes the organophosphate, organophosphonate, and/or organophosphinate molecule. PTEs contain a distorted (β/α)s or triose phosphate isomerase (TIM)-barrel, which includes a core barrel of eight parallel β-strands surrounded by eight α-helices with the two ends of the barrel being formed by the loops connecting each β-strand to the subsequent α-helix, and by the loops connecting each α-helix to the subsequent β-strand. The active site of a PTE is located at the C-terminal end (as defined by the orientation of the [parallel] core β-strands) of the TIM-barrel. The active site contains a binuclear metal center ligated to residues from the C-terminal ends of the core β-strands, with the substrate binding site being formed by the loops that make up the C-terminal end of the barrel (i.e., those loops connecting each β-strand to the subsequent α-helix). Thus, PTEs are generally associated with one or two metal cations, including divalent cations such as, for example and without limitation, Zn²⁺, Co²⁺, Cd²⁺, Mn²⁺, Ni²⁺, Fe²⁺, Mg²⁺, Ca²⁺, Cu²⁺, Ag⁺, and Hg²⁺.

[0068] The biological functions and catalytic mechanisms of PTEs are further described, for example, in Bigley and Raushel (Catalytic mechanisms for phosphotriesterases; Biochem Biophys Acta, (2013) 1834 (1): 443-453), which is incorporated by reference in its entirety. See also Shapir et al., J Bacteriol. (2002) 184(19): 5376-84; Chae et al., Arch Biochem Biophys. (1995) 316(2): 765-72; Porzio et al., Chem Biol Interact. (2013) 203(1):251-6; Hiblot et al. PLoS One (2013) 8(9): e75272; Suzumoto et al., Int J Mol Sci. (2020) 21(5): 1683; and Merone et al., Extremophiles (2005) 9(4):297-305; the contents of which are incorporated by reference in their entireties. Serdar et al., describes the PTE derived from B. diminuta in Applied and Environmental Microbiology, 1982, 44(1) 246-249, which is incorporated by reference in its entirety. The B. diminuta PTE has been shown to hydrolyze and inactivate the nerve agents VX and VR.

[0069] A schematic of VX hydrolysis is shown below:

[chemical structure]

[0070] As illustrated in the above schematic of VX hydrolysis, N-[2-[ethoxy(methyl)phosphoryl]sulfanylethyl]-N-propan-2-ylpropan-2-amine in the presence of water is hydrolyzed to form 2-(diisopropylamino)ethane-1-thiol and ethyl hydrogen methylphosphonate.

[0071] A schematic of VR hydrolysis is shown below:

[chemical structure]

[0072] As illustrated in the above schematic of VR hydrolysis, N, N-diethyl-2-[methyl(2-methylpropoxy)phosphoryl]sulfanylethanamine in the presence of water is hydrolyzed to form 2-(diethylamino)ethane-1-thiol and isobutyl hydrogen methylphosphonate.

[0073] A schematic of GB (Sarin) hydrolysis is shown below in which Sarin is converted to isopropyl methylphosphate and then to methylphosphonic acid:

[chemical structure]

[0074] A schematic of GD (Soman) hydrolysis is shown below, in which Soman is converted to pinacolyl methylphosphonic acid and then to methylphosphonic acid:

[chemical structure]

[0075] In some embodiments, the V-agent is VX. In some embodiments, the V-agent is VR. In some embodiments, the G-agent is GB. In some embodiments, the G-agent is GD. In some embodiments, the OPNA hydrolyzing enzyme, the V-agent hydrolyzing enzyme, or the G-agent hydrolyzing enzyme is a PTE. In some embodiments, the PTE has hydrolase activity on VR, VX, GB, and/or GD. In some embodiments, the PTE has hydrolase activity at least on both VR and VX. In some embodiments, the PTE has hydrolase activity at least on both GB and GD. In some embodiments, the PTE has hydrolase activity at least on both GB and VR. In some embodiments, the PTE has hydrolase activity at least on both GB and VX. In some embodiments, the PTE has hydrolase activity at least on both GD and VR. In some embodiments, the PTE has hydrolase activity at least on both GD and VX. In some embodiments, the PTE has hydrolase activity at least on VX, VR, and GD. In some embodiments, the PTE has hydrolase activity at least on VX, VR, and GB. In some embodiments, the PTE has hydrolase activity at least on VX, GB, and GD. In some embodiments, the PTE has hydrolase activity at least on VR, GB, and GD. In some embodiments, the PTE has hydrolase activity at least on VX, VR, GB, and GD.

[0076] In some embodiments, the OPNA hydrolyzing enzyme, the V-agent hydrolyzing enzyme, or the G-agent hydrolyzing enzyme is a B. diminuta PTE or variant thereof.

[0077] In some embodiments, the OPNA hydrolyzing enzyme or the V-agent hydrolyzing enzyme is the B. diminuta PTE variant G1-C74 (Cherny et al. (2013) ACS Chemical Biology, 8(11), 2394-2403). The B. diminuta PTE variant G1-C74 is provided by SEQ ID NO: 5 (expressed in strain t402006 described in the Examples):

(SEQ ID NO: 5)
MIGTGDRINTVRGPITISEAGFTLTHEHICGSSAGFLRAWPEFFGSRAAL
VEKAVRGLRRARAAGVRTIVDVSTFDAGRDVSLLAEVSRAADVHIVAATG
LWFDPPLSMRLRSVEELTQFFLREIQYGIEDTGIRAGIIKVATTGKATPF
QELVLKAAARASLATGVPVTTHTAASQRDGEQQAAIFESEGLSPSRVCIG
HSDDTDDLSYLTALAARGYLIGLDNIPHSAIGLEDNASASALLGSRSWQT
RALLIKALIDQGYMKQILVSNDWLFGFSSYVTNIMDVMDRVNPDGMAFIP
LRVIPFLREKGVPQETLAGITVTNPARFLSPTLRAS.

[0078] A non-limiting example of a nucleotide sequence encoding SEQ ID NO: 5 is provided by SEQ ID NO: 14:

(SEQ ID NO: 14)
atgattggcacgggtgatcgaatcaatactgtacgtggccctatcaccat
aagcgaggcgggtttcacactgactcatgaacacatctgtggatcctctg
ctggttttttacgcgcgtggccggaatttttcggctcgagggcagctctg
gtggaaaaagcagttcggggtctgcgtcgcgctcgtgccgcaggcgttag
aaccattgtggacgtatcaaccttcgatgctggtcgtgacgtcagccttc
tggcagaggtttctcgtgctgccgacgtacacattgtggctgcaactggt
ctgtggttcgatccacccctgtccatgcgtctgcgctcagttgaagagct
gactcagtttttcctccgtgaaatccagtatggtatcgaagataccggca
tccgcgctggaatcattaaagttgcgaccacggggaaagccaccccgttc
caggaattggtactgaaagctgcggcacgtgcgtccctcgcaactggcgt
cccggttactacgcacacggctgcttctcagcgcgacggcgaacagcagg
cagccatttttgaaagcgagggtctgtccccgtctagggtctgcateggc
catagcgacgacaccgatgatttaagctacttaacagcactggccgcccg
tgggtacctgataggcctggataacatcccgcacagcgctatcggactgg
aagacaacgcgagtgcttctgctctgctgggttcccgttcctggcaaact
agagcactgctgatcaaggctctgattgatcaggggtacatgaaacaaat
ccttgtgagcaacgactggctgttcggtttcagttcgtatgttaccaaca
tcatggacgttatggatcgcgtgaaccctgacggtatggcgttcattccg
ttgagagtgatcccattcctgcgtgagaaaggcgtaccccaggaaaccct
ggccggtatcactgtaacaaatccggctcgctttctgtctccgactctgc
gcgcatct.

[0079] In some embodiments, the OPNA hydrolyzing enzyme, the V-agent hydrolyzing enzyme, or the G-agent hydrolyzing enzyme is a Mycobacterium sp. 852014-52450_SCH5900713 PTE. The Mycobacterium sp. 852014-52450_SCH5900713 PTE provided by SEQ ID NO: 1 was identified in the screen described in Example 1 (expressed in strain t402181):

(SEQ ID NO: 1)
MSELNTARGAIDTTDLGVTLMHEHVFIMTTEIALNYPEAWGDEDKRVA
DAVSRLNELKARGVDTIVDLTVIGLGRYIPRIARVAAATELNIVVATG
LYTYNDVPFRFHYEGPGGMLDGPEIMTEMFVRDIEQGIADTGVKAGIL
KCATDEPGITPGVERVLRAVAQAHKRTGVPISTHTHAGLRRGLEQQRI
FEEEGVDLTRVVIGHSGDSTDIGYLEELIAAGSYLGMDRFGLDVISPF
EERVKIVAQMCERGHADKMVLSHDANCYFDALPEELVPQMAPNWHYLH
IHNDVIPALKERGVTDEQLKTMLVDNPRRIFERQGAYE.

[0080] A non-limiting example of a nucleotide sequence encoding SEQ ID NO: 1 is provided by SEQ ID NO: 10;

(SEQ ID NO: 10)
atgtccgagctgaataccgcccgtggggctattgatacaacggaccta
ggcgtgactcttatgcacgaacatgtattcatcatgaccactgaaatc
gcactgaactatccggaagcttggggtgacgaagataaacgcgtcgcg
gacgcagtttctcggctcaacgagctgaaggctaggggcgttgatact
atagttgatctgaccgtaatcggtctgggtcgttacattccacgtatc
gcgcgagtggccgctgctaccgaattaaacatcgtcgtggcgaccggc
ctgtacacttataacgacgttccttttcgtttccactacgaaggcccc
gggggtatgttggacggtccggagattatgacggaaatgttcgttcgc
gatatcgagcagggaatcgcagacactggcgtaaaagcaggcattctg
aaatgtgccacagatgaaccaggtatcaccccgggtgttgaacgtgta
ctgcgcgctgtagcgcaagcgcataagagaacgggtgttccgatctca
acccacacccacgctggcctgcgtcgtggcctggagcagcagcgtatt
tttgaagaagaaggcgtggacctgactcgcgtcgtgattggtcattcg
ggtgacagcactgatatcggctacttggaggaattgatcgctgcgggt
tcttatctgggcatggatcgcttcggactcgacgttatcagcccgttt
gaagaacgtgtgaaaattgttgcccagatgtgcgagcgcggtcacgca
gataaaatggttctgtctcacgacgccaattgctacttcgacgcactc
ccggaagaactggtcccgcaaatggctcctaactggcactacctgcat
atacataatgatgtgatcccagcactgaaagagcgaggtgtgaccgat
gaacagctgaagactatgctggtagacaacccgcgtaggatcttcgag
cgccagggcgcttacgaa.

[0081] In some embodiments, the OPNA hydrolyzing enzyme, the V-agent hydrolyzing enzyme, or the G-agent hydrolyzing enzyme is a Mycobacterium colombiense PTE. The Mycobacterium colombiense PTE provided by SEQ ID NO: 2 was identified in the screen described in Example 1 (expressed in strain t401393):

(SEQ ID NO: 2)
MSELNTARGSIDTAALGVTLMHEHVFIMTTEIAENYPEAWGDEDRRVA
DAVKRLNELKARGVDTIVDLTVIGLGRYIPRIARVAAETELNIVVATG
LYTYNDVPMYFHYLGPGGELGGPEIMTDMFVRDIEQGIADTGIKAGIL
KCATDTPGVTPGVERVLRAVAQAHKRTGVPISTHTHAGLRRGLEQQKI
FEEEGVDLSRVIIGHSGDSTDIGYLEELIAAGSYLGMDRFGIDAFLPF
EDRVNTVAQMCERGHADKMVLSHDANCYFDALPDELVSQVMPNWHYLH
IHNDVIPALKERGVTDEQLHTMLVDNPRRIFERQGAYE.

[0082] A non-limiting example of a nucleotide sequence encoding SEQ ID NO: 2 is provided by SEQ ID NO: 11:

(SEQ ID NO: 11)
atgagtgagcttaacacggcaaggggttcgatcgacactgccgcgctc
ggcgtaaccctgatgcatgaacacgtgtttattatgactaccgaaatc
gctgaaaattatcccgaggcttggggagatgaagaccgtagagttgct
gatgcagtcaagcgtttaaacgaactgaaagcgcggggcgttgacaca
atagttgatttgactgtaattggtctggggcgttacatcccgcgcatc
gcccgagtggctgcggaaaccgagctgaacattgtagttgctactggt
ctgtacacttacaacgacgttccgatgtatttccactacctgggccca
ggcggtgaactgggtggcccggaaatcatgaccgatatgttcgtgcgt
gacatcgagcaaggtatcgctgataccggaattaaagcaggtatcctc
aaatgcgcaactgacacacctggcgtcaccccgggcgtggaacgtgtt
ctgcgtgctgtagcccaggcacataaacgcaccggtgtcccgatctcc
acgcacacccatgcaggcctgcgccgtggcctggaacagcagaagatt
tttgaagaagagggggttgatctgagccgcgtgattatcggtcactct
ggcgactctactgacatcggttatctggaggaattgattgcgggggta
gctacctaggcatggatcgtttcggtatcgacgctttcctgccgttcg
aggaccgagtaaacacggttgcccagatgtgtgaacgcggccacgccg
ataaaatggttctgtcccacgatgctaattgctactttgacgcgctgc
ctgatgaactggtatctcaagtgatgccaaactggcattatttacaca
tccataacgacgtaatcccggctttaaaagaacgcggcgttaccgatg
agcagctgcacactatgctggttgacaacccgagaagaatcttcgaac
gtcagggtgcttacgaa.

[0083] In some embodiments, the OPNA hydrolyzing enzyme, the V-agent hydrolyzing enzyme, or the G-agent hydrolyzing enzyme is a Mycobacterium asiaticum PTE. The Mycobacterium asiaticum PTE provided by SEQ ID NO: 3 was identified in the screen as described in Example 1 (expressed in strain t402076):

(SEQ ID NO: 3)
MSELNTARGPIDTADLGVTLMHEHVFIMTTEIALNYPDAWGDEEQRVA
DAITRLNELKSRGVDTIIDLTVIGLGRYIPRIARVAAETELNIVVATG
LYTYNDIPFRFHYEGPGGLLGGPEIMTDMFVRDIEEGIADTGIKAGIL
KCATDEPGITPGVERVLRAVAQAHKRTGVPISTHTHAGLRRGLEQQRI
FEEEGVDLTRVIIGHSGDSTDVGYLEELIAAGSYLGMDRFGLDVISPF
EQRVDIVAQMCERGHADKMVLSHDANCYFDALPEELVPQMAPNWHYLH
IHNDVLPALKERGVTDEQIHTMLVENPRKIFDRQGAYQ.

[0084] A non-limiting example of a nucleotide sequence encoding SEQ ID NO: 3 is provided by SEQ ID NO: 12:

(SEQ ID NO: 12)
atgagcgaactgaatacggcccgcggtcccattgatactgctgactta
ggagtaaccctgatgcacgagcatgtgtttatcatgacaactgaaatc
gcacttaactatcctgacgcgtggggcgatgaagagcaacgtgtcgct
gacgcaataacccgtttgaacgaactgaaatcgagaggggttgatacc
attatcgacctgactgttatcggtctgggtcgctacattccacgtatc
gctcgtgtggcggccgaaaccgagctgaacatcgttgtagctactggc
ctctacacttataacgatatcccgttccgattccactacgaaggcccg
ggcggtctgcttggtggcccggaaataatgaccgacatgtttgttcgg
gatatcgaagaaggcatcgcggatacgggtattaaggcaggtatttta
aaatgtgctacggacgaaccgggtatcaccccgggcgtcgagcgcgtt
ctgcgtgctgtggcgcaggctcataaacgcactggcgtacctatctct
acccacactcacgccggtctgcgtcgcgggctggaacagcagcgtatt
ttcgaggaagagggcgtggacctgacacgtgttatcatcgggcattcc
ggtgactcaaccgatgtaggctacctggaagaactgattgcggcaggt
agttatctgggtatggatcgcttcggcttggacgtgatcagcccgttt
gagcaacgtgttgatattgtagcgcagatgtgcgaacgcggtcacgct
gataagatggtcctgtctcacgacgcgaactgctacttcgacgctcta
ccagaagaactggttccccagatggcaccgaattggcattatttgcac
atccacaacgacgttctgccagcactgaaagagcgtggagtcaccgac
gaacagattcatacgatgttagttgaaaacccgcgtaaaatttttgat
cgtcagggtgcttaccag.

[0085] In some embodiments, the OPNA hydrolyzing enzyme, the V-agent hydrolyzing enzyme, or the G-agent hydrolyzing enzyme is a Mycobacterium gordonae PTE. The Mycobacterium gordonae PTE provided by SEQ ID NO: 4 was identified in the screen described in Example 1 (expressed in strain t402353):

(SEQ ID NO: 4)
MSELNTARGTIDTADLGVTLMHEHVFIMTTEIALNYPEAWGDEEKRVA
DAVARLNELKSRGVDTIVDLTVIGLGRYIPRIARVAAQTELNIVVATG
LYTYNDIPFRFHYEGPGGMLDGPEIMTDMFVRDIEQGIADTGIKAGIL
KCATDEPGITPGVERVLRAVAQAHKRTGVPISTHTHAGLRRGLEQQRI
FEEEGVDLTRVIIGHSGDSTDVGYLEELISAGSYLGMDRFGLDVLLPF
EERVQIVATMCERGHADKMVLSHDANCYFDALPEQLVPQMAPNWHYLH
IHNDVIPALKHRGVTDEQIHTMLVENPRKIFDRQGAYQ.

[0086] A non-limiting example of a nucleotide sequence encoding SEQ ID NO: 4 is provided by SEQ ID NO: 13:

(SEQ ID NO: 13)
atgtctgaactgaatacagctcgcggcacgatagacactgccgatctt
ggtgtcaccctcatgcatgagcacgtttttatcatgaccactgaaatc
gcgctaaactatccagaagcatggggtgatgaagagaaacgtgtagct
gacgctgttgcccgtctgaacgaactgaagtcacgaggggtggatacc
attgttgacctgaccgtgattggcctgggtcgctacatccctcgtatc
gcacgtgtggcggctcagacggaattaaacattgtcgttgcaactggc
ctgtacacatacaatgatattccgttccgcttccactatgagggcccg
ggaggtatgctggacggtccggaaatcatgactgatatgtttgtgcgt
gacatcgaacaaggcatcgcggacaccgggatcaaagctggtatcctt
aaatgcgccaccgatgaaccgggcattactccaggtgtagaaagggtt
ttgcgtgctgtagcgcaggctcacaaacgtacgggcgtcccgatttcc
actcatacccacgcaggtctgcgccgcggcctggagcagcagcgcatc
ttcgaagaggaaggtgttgacctcactcgtgttatcataggtcacagc
ggcgattcgaccgatgtcgggtacctggaagaactgattagcgcaggt
tcttatttaggcatggaccgtttcggcctcgatgtgctgctgcccttt
gaggagcgggtacaaatcgttgcaacaatgtgtgaaagaggccatgcc
gacaagatggtactgtcccacgatgcgaactgctacttcgacgctctg
ccggaacagctggtaccgcagatggctccaaactggcattacctgcac
atccataacgacgtgatccctgcgctgaaacaccgcggtgttactgac
gaacaaatccacacgatgctggttgaaaacccgcgtaaaatcttcgac
cgtcagggtgcctatcag.

[0087] In some embodiments, the OPNA hydrolyzing enzyme, the V-agent hydrolyzing enzyme, or the G-agent hydrolyzing enzyme is a Brevundimonas diminuta PTE. A Brevundimonas diminuta PTE is provided by SEQ ID NO: 7. This sequence corresponds to the amino acid sequence of UniprotKB Accession No. P0A434, except that the signal sequence is removed and a methionine residue is added at the N-terminus:

(SEQ ID NO: 7)
MIGTGDRINTVRGPITISEAGFTLTHEHICGSSAGFLRAWPEFFGSRK
ALAEKAVRGLRRARAAGVRTIVDVSTFDIGRDVSLLAEVSRAADVHIV
AATGLWFDPPLSMRLRSVEELTQFFLREIQYGIEDTGIRAGIIKVATT
GKATPFQELVLKAAARASLATGVPVTTHTAASQRDGEQQAAIFESEGL
SPSRVCIGHSDDTDDLSYLTALAARGYLIGLDHIPHSAIGLEDNASAS
ALLGIRSWQTRALLIKALIDQGYMKQILVSNDWLFGFSSYVTNIMDVM
DRVNPDGMAFIPLRVIPFLREKGVPQETLAGITVTNPARFLSPTLRAS.

[0088] A non-limiting example of a nucleotide sequence encoding SEQ ID NO: 7 is provided by SEQ ID NO: 16:

(SEQ ID NO: 16)
atgattggcacgggtgatcgaatcaatactgtacgtggccctatcacc
ataagcgaggcgggtttcacactgactcatgaacacatctgtggatcc
tctgctggttttttacgcgcgtggccggaatttttcggctcgaggaaa
gctctggcggaaaaagcagttcggggtctgcgtcgcgctcgtgccgca
ggcgttagaaccattgtggacgtatcaaccttcgatatcggtcgtgac
gtcagccttctggcagaggtttctcgtgctgccgacgtacacattgtg
gctgcaactggtctgtggttcgatccacccctgtccatgcgtctgcgc
tcagttgaagagctgactcagtttttcctccgtgaaatccagtatggt
atcgaagataccggcatccgcgctggaatcattaaagttgcgaccacg
gggaaagccaccccgttccaggaattggtactgaaagctgcggcacgt
gcgtccctcgcaactggcgtcccggttactacgcacacggctgcttct
cagcgcgacggcgaacagcaggcagccatttttgaaagcgagggtctg
tccccgtctagggtctgcatcggccatagcgacgacaccgatgattta
agctacttaacagcactggccgcccgtgggtacctgataggcctggat
catatcccgcacagcgctatcggactggaagacaacgcgagtgcttct
gctctgctgggtattcgttcctggcaaactagagcactgctgatcaag
gctctgattgatcaggggtacatgaaacaaatccttgtgagcaacgac
tggctgttcggtttcagttcgtatgttaccaacatcatggacgttatg
gatcgcgtgaaccctgacggtatggcgttcattccgttgagagtgatc
ccattcctgcgtgagaaaggcgtaccccaggaaaccctggccggtatc
actgtaacaaatccggctcgctttctgtctccgactctgcgcgcatct

[0089] In some embodiments, the OPNA hydrolyzing enzyme, the V-agent hydrolyzing enzyme, or the G-agent hydrolyzing enzyme is a Brevundimonas diminuta PTE comprising the sequence of SEQ ID NO: 8:

(SEQ ID NO: 8)
GDRINTVRGPITISEAGFTLTHEHICGSSAGFLRAWPEFFGSRAALVE
KAVRGLRRARAAGVRTIVDVSTFDAGRDVSLLAEVSRAADVHIVAATG
LWEDPPLSMRLRSVEELTQFFLREIQYGIEDTGIRAGIIKVATNGKAT
PFQELVLRAAARASLATGVPVTTHTAASQRDGEQQAAIFESEGLSPSR
VCIGHSDDTDDLSYLTALAARGYLIGLDGIPHSAIGLEDNASASELLG
IRSWQTRALLIKALIDQGYMKQILVSNDWLFGFSSYVTNIMDVMDSVN
PDGMAFIPLRVIPFLREKGVPQETLAGITVTNPARFLSPTLRAS.

[0090] SEQ ID NO: 8 corresponds to a PTE variant, referred to as IVH3, which contains an N-terminal truncation and multiple amino acid substitutions relative to the parent sequence corresponding to SEQ ID NO: 7. The catalytic mechanisms and efficiencies of PTE variants, including IVH3, are further described, for example, in Goldsmith et al. (Catalytic efficiencies of directly evolved phosphotriesterase variants with structurally different organophosphorus compounds in vitro, Arch Toxicol, (2016) 90 (11): 2711-2724), which is incorporated by reference in its entirety.

[0091] In some embodiments, the OPNA hydrolyzing enzyme, the V-agent hydrolyzing enzyme, or the G-agent hydrolyzing enzyme is a phosphotriesterase-related protein (PTER). PTERs (also referred to as PTE-homology proteins (PHPs)) are members of the amidohydrolase superfamily and are a group of proteins evolutionarily related to PTEs. PTERs share both sequence homology and structural similarity to PTEs, including a binuclear (Zn²⁺ or other metal ion) metal center. Several differences have been noted in the active site of PTERs relative to PTEs. For example, both human and E. coli PTER have Tyr128/Tyr84 (human/E. coli) in the active site, instead of the Trp131, which is present in the B. diminuta PTE. Both human and E. coli PTER also have Glu169/Glu125 (Human/E. coli), rather than carboxylated Lys169, which is present in PTEs. Both human and E. coli PTER also have a 1-residue insertion, adjacent to the Glu169/Glu125 residue. PTERs are described further in Roodveldt et al. (2005) Biochemistry, 44(38), 12728-12736; Buchbinder et al. (1998) Biochemistry, 37, 5096-5106; Hou et al. (1996) Gene, 168(2), 157-163; and Wang et al. (2011) Agricultural Sciences, 02(04), 406-412, each of which is incorporated by reference in its entirety in this disclosure.

[0092] In some embodiments, the PTER has hydrolase activity at least on both GB and GD. In some embodiments, the PTER has hydrolase activity at least on both GB and VR. In some embodiments, the PTER has hydrolase activity on VR or VX. In some embodiments, the PTER has hydrolase activity at least on both VR and VX. In some embodiments, the PTER has hydrolase activity at least on both GB and VX. In some embodiments, the PTER has hydrolase activity at least on both GD and VR. In some embodiments, the PTER has hydrolase activity at least on both GD and VX. In some embodiments, the PTER has hydrolase activity at least on VX, VR, and GD. In some embodiments, the PTER has hydrolase activity at least on VX, VR, and GB. In some embodiments, the PTER has hydrolase activity at least on VX, GB, and GD. In some embodiments, the PTER has hydrolase activity at least on VR, GB, and GD. In some embodiments, the PTER has hydrolase activity at least on VX, VR, GB, and GD. In some embodiments, the OPNA hydrolyzing enzyme, the V-agent hydrolyzing enzyme, or the G-agent hydrolyzing enzyme is a Prosthecomicrobium hirschii PTER. The Prosthecomicrobium hirschii PTER provided by SEQ ID NO: 6 is expressed in strain t401609 described in the Examples:

(SEQ ID NO: 6)
MAAAETGTGHARIETVLGPIAPAALGATLMHEHLLCDLTPPARRGQGL
PEPEITLETIFDMGYRPGRYHGNHRLQDVALATREAAAFKADGGGAIV
ELTTGGIVPDPEGLAAIARGAGIHVVLGAGFYTENFLDAETLALSTEA
LTEITLGQLTEGAWGTKVRCGLIGEIGCSWPLTPFERRSLKSGARAQI
ATGAAITIHPGRDRAAPDEILDVLEAEGADLSRVVIGHMDRTLLDDAD
VVALARRGSIVEYDFFGIEHSNYWLGVVDIPNDWMRIRALRKLFDAGL
GDRVVISHDICTRTRLQSLGGHGYGHILRNVVPLMRDRGFSQSEIDLL
LLETPRRILTIGG

[0093] A non-limiting example of a nucleotide sequence encoding SEQ ID NO: 6 is provided by SEQ ID NO: 15:

(SEQ ID NO: 15)
atggcagctgccgagacagggacgggccacgcgcgtatcgaaactgta
ttaggtcccattgctccagcagccctgggtgctaccctgatgcatgaa
caccttctgtgcgacctcactccgcctgcgcggcgcggccaaggtctg
ccggaaccggagatcaccctggaaactatatttgatatgggctatagg
ccgggccgttaccatggtaatcaccgactgcaagacgtcgctctggcg
acccgtgaagccgcagctttcaaggcggatggaggtggcgctatcgtt
gagctaaccacgggcggtattgttccggatccagaaggcctggctgca
atcgcccgcggtgccgggattcatgtggtattgggtgcgggcttctac
accgaaaactttctggacgctgaaactcttgctctgtccacagaggca
ttgactgaaatcaccctgggccagttaaccgaaggtgcatggggaact
aaagtgcgttgtggtctgatcggcgagatcggatgcagctggccgctg
acgcctttcgaacgccgttcactgaaatctggtgctcgtgcacagatt
gctactggcgcggctatcaccattcacccgggtcgcgaccgcgcggca
ccggatgagatcctggacgttctggaagcggaaggcgctgatctatcg
cgtgtcgttataggtcacatggaccgtacactgctggacgatgcagat
gttgttgcactcgctcgccgtggtagcatcgtagagtatgatttcttc
ggcatcgaacactctaactactggctgggggtggtagacattcctaac
gattggatgcgtatccgggcgctgagaaaattgtttgacgccggtctt
ggagacagggtcgtaatcagccatgatatttgcactcgtacccgtctg
caatccctgggcggccatggttacgggcacatcctgcgcaacgtggtt
ccgcttatgcgcgatcgtggtttcagtcagtctgaaatcgacctcctg
ctgctggaaaccccacgacgtattctgaccattggtggg.

[0094] In some embodiments, the PTER is a Homo sapiens PTER. The amino acid sequence of Homo sapiens PTER can be found at UniProt Accession No. Q96BW5 and is provided as SEQ ID NO: 9 below:

(SEQ ID NO: 9)
MSSLSGKVQTVLGLVEPSKLGRTLTHEHLAMTFDCCYCPPPPCQEAIS
KEPIVMKNLYWIQKNAYSHKENLQLNQETEAIKEELLYFKANGGGALV
ENTTTGISRDTQTLKRLAEETGVHIISGAGFYVDATHSSETRAMSVEQ
LTDVLMNEILHGADGTSIKCGIIGEIGCSWPLTESERKVLQATAHAQA
QLGCPVIIHPGRSSRAPFQIIRILQEAGADISKTVMSHLDRTILDKKE
LLEFAQLGCYLEYDLFGTELLHYQLGPDIDMPDDNKRIRRVRLLVEEG
CEDRILVAHDIHTKTRLMKYGGHGYSHILTNVVPKMLLRGITENVLDK
ILIENPKQWLTFK

[0095] A non-limiting example of a nucleotide sequence encoding SEQ ID NO: 9 is provided by SEQ ID NO: 17:

(SEQ ID NO: 17)
atgtcttccttaagtggaaaagtccaaaccgttttgggccttgtagag
ccaagcaaactgggccgtaccctgacccatgaacacctggccatgacc
tttgactgctgttactgtccacctcccccgtgccaggaagctatttcc
aaagaacctatcgtgatgaaaaatttatattggattcagaaaaacgcc
tattcccataaagaaaaccttcaattaaatcaggagacagaagccata
aaggaagaactgttgtattttaaagctaatggtggaggggctttggtg
gaaaacacaaccactgggattagccgagacacacagacgttgaagagg
cttgcagaagagactggcgtccatatcatatctggagccgggttttat
gtggatgcaactcactcctcagagaccagggccatgtcagtggagcag
cttaccgatgtccttatgaatgaaattctccatggagctgatggaacc
agtatcaagtgtggcattattggagaaattggttgctcctggcctttg
actgagagtgaaagaaaggttctccaggccacagctcatgcccaggct
cagcttggttgtcctgttattatccatcctggacggagctccagggca
ccatttcagattatccgaatattgcaagaagcaggcgcagacatctcc
aaaacagtcatgtcacacctggataggactattcttgataagaaagag
ctcttggagtttgctcaacttggctgctacttggaatatgatctcttt
ggtactgaactacttcattaccaactcggcccagatattgacatgcct
gatgataacaaaagaattagaagggtgcgtctcctggtggaagagggc
tgtgaagatcgaattctggtagcacatgacatacatacgaaaacccgg
ctgatgaaatatggaggtcacggctattctcatatactcaccaatgtt
gttcctaaaatgttgctgagaggcataactgagaatgtgcttgataag
attctaatagagaaccctaagcaatggctaactttcaaatag

[0096] In some embodiments, the present disclosure provides an OPNA hydrolyzing enzyme that is a PTE or PTER. In some embodiments, the OPNA hydrolyzing enzyme is a V-agent hydrolyzing enzyme. In some embodiments, the V-agent hydrolyzing enzyme is active against VX. In some embodiments, the V-agent hydrolyzing enzyme is active against VR. In some embodiments, the V-agent hydrolyzing enzyme is active against both VX and VR. In some embodiments, the OPNA hydrolyzing enzyme is a G-agent hydrolyzing enzyme. In some embodiments, the G-agent hydrolyzing enzyme is active against GB. In some embodiments, the G-agent hydrolyzing enzyme is active against GD. In some embodiments, the G-agent hydrolyzing enzyme is active against both GB and GD. In some embodiments, the OPNA hydrolyzing enzyme has activity as both a V-agent hydrolyzing enzyme and a G-agent hydrolyzing enzyme.

[0097] In some embodiments, PTEs or PTERs associated with the disclosure are active against one or more of: (1) G-agents, including but not limited to, tabun (GA), sarin (GB), soman (GD), and cyclosarin (GF); (2) V-agents, including but not limited to, CVX (also known as Chinese VX), VE, VG, VM, VR (also known as Russian VX), and VX; (3) GV-agents, including but not limited to, GV itself, namely 2-dimethylaminoethyl-(dimethylamido)-fluorophosphate; (4) A-agents, including but not limited to, substance-33, A-230, A-232, and A-234; and/or (5) other OPNAs, including but not limited to, organophosphorus pesticides such as parathion, chlorpyriphos, malathion, fenitrothion, and monocrotophos.

[0098] It should be appreciated that sequences disclosed in this application may or may not contain signal peptides and/or secretion signals. The sequences disclosed in this application encompass versions with or without signal peptides and/or secretion signals. It should also be understood that amino acid sequences disclosed in this application may be depicted with or without a start codon (M). The sequences disclosed in this application encompass versions with or without start codons. Accordingly, in some instances amino acid numbering may correspond to amino acid sequences containing a signal peptide and/or secretion signal and/or a start codon, while in other instances, amino acid numbering may correspond to amino acid sequences that do not contain a signal peptide and/or a secretion signal and/or a start codon. It should also be understood that sequences disclosed in this application may be depicted with or without a stop codon. The sequences disclosed in this application encompass versions with or without stop codons. Aspects of the disclosure encompass OPNA hydrolyzing enzymes or V-agent hydrolyzing enzymes comprising any of the sequences described in this application and fragments thereof.

[0099] In some embodiments, a PTE provided in this disclosure comprises an amino acid sequence that is at least 5%, at least 10%, at least 15%, at least 20%, at least 25%, at least 30%, at least 35%, at least 40%, at least 45%, at least 50%, at least 55%, at least 60%, at least 65%, at least 70%, at least 71%, at least 72%, at least 73%, at least 74%, at least 75%, at least 76%, at least 77%, at least 78%, at least 79%, at least 80%, at least 81%, at least 82%, at least 83%, at least 84%, at least 85%, at least 86%, at least 87%, at least 88%, at least 89%, at least 90%, at least 91%, at least 92%, at least 93%, at least 94%, at least 95%, at least 96%, at least 97%, at least 98%, at least 99%, or 100% identical to any one of SEQ ID NOs: 1-5, 7 or 8, including all values in between. In some embodiments, the PTE comprises an amino acid sequence that is at least 90% identical to any one of SEQ ID NOs: 1-5, 7 or 8. In some embodiments, the PTE comprises or consists of an amino acid sequence corresponding to any one of SEQ ID NOs: 1-5, 7 or 8.

[0100] In some embodiments, a PTE provided in this disclosure is encoded by a nucleotide sequence that is at least 5%, at least 10%, at least 15%, at least 20%, at least 25%, at least 30%, at least 35%, at least 40%, at least 45%, at least 50%, at least 55%, at least 60%, at least 65%, at least 70%, at least 71%, at least 72%, at least 73%, at least 74%, at least 75%, at least 76%, at least 77%, at least 78%, at least 79%, at least 80%, at least 81%, at least 82%, at least 83%, at least 84%, at least 85%, at least 86%, at least 87%, at least 88%, at least 89%, at least 90%, at least 91%, at least 92%, at least 93%, at least 94%, at least 95%, at least 96%, at least 97%, at least 98%, at least 99%, or 100% identical to any one of SEQ ID NOs: 10-14, including all values in between. In some embodiments, the PTE is encoded by a nucleotide sequence that is at least 90% identical to any one of SEQ ID NOs: 10-14. In some embodiments, the PTE is encoded by a nucleotide sequence corresponding to any one of SEQ ID NOs: 10-14.

[0101] In some embodiments, a PTER provided in this disclosure comprises an amino acid sequence that is at least 5%, at least 10%, at least 15%, at least 20%, at least 25%, at least 30%, at least 35%, at least 40%, at least 45%, at least 50%, at least 55%, at least 60%, at least 65%, at least 70%, at least 71%, at least 72%, at least 73%, at least 74%, at least 75%, at least 76%, at least 77%, at least 78%, at least 79%, at least 80%, at least 81%, at least 82%, at least 83%, at least 84%, at least 85%, at least 86%, at least 87%, at least 88%, at least 89%, at least 90%, at least 91%, at least 92%, at least 93%, at least 94%, at least 95%, at least 96%, at least 97%, at least 98%, at least 99%, or 100% identical to SEQ ID NO: 6 or 9, including all values in between. In some embodiments, the PTER comprises an amino acid sequence that is at least 90% identical to SEQ ID NO: 6 or 9. In some embodiments, the PTER comprises or consists of an amino acid sequence corresponding to SEQ ID NO: 6 or 9.

[0102] In some embodiments, a PTER provided in this disclosure is encoded by a nucleotide sequence that is at least 5%, at least 10%, at least 15%, at least 20%, at least 25%, at least 30%, at least 35%, at least 40%, at least 45%, at least 50%, at least 55%, at least 60%, at least 65%, at least 70%, at least 71%, at least 72%, at least 73%, at least 74%, at least 75%, at least 76%, at least 77%, at least 78%, at least 79%, at least 80%, at least 81%, at least 82%, at least 83%, at least 84%, at least 85%, at least 86%, at least 87%, at least 88%, at least 89%, at least 90%, at least 91%, at least 92%, at least 93%, at least 94%, at least 95%, at least 96%, at least 97%, at least 98%, at least 99%, or 100% identical to SEQ ID NOs: 15 or 17, including all values in between. In some embodiments, the PTER is encoded by a nucleotide sequence corresponding to SEQ ID NO: 15 or 17.

[0103] Unless otherwise noted, the term “sequence identity,” which is used interchangeably in this disclosure with the term “percent identity,” as known in the art, refers to a relationship between the sequences of two polypeptides or polynucleotides, as determined by sequence comparison (alignment). In some embodiments, sequence identity is determined across the entire length of a sequence. In some embodiments, sequence identity is determined over a region (e.g., a stretch of amino acids or nucleic acids, e.g., the sequence spanning an active site) of a sequence. For example, in some embodiments, sequence identity is determined over a region corresponding to at least 30%, at least 40%, at least 50%, at least 60%, at least 70%, at least 80%, at least 90%, at least 95%, or over 100% of the length of the reference sequence.

[0104] Identity of related amino acid or nucleotide sequences can be readily calculated by any of the methods known to one of ordinary skill in the art. The percent identity of two sequences (e.g., nucleic acid or amino acid sequences) may, for example, be determined using the algorithm of Karlin and Altschul Proc. Natl. Acad. Sci. USA 87:2264-68, 1990, modified as in Karlin and Altschul Proc. Natl. Acad. Sci. USA 90:5873-77, 1993. Such an algorithm is incorporated into the NBLAST® and XBLAST® programs (version 2.0) of Altschul et al., J. Mol. Biol. 215:403-10, 1990. BLAST® protein searches can be performed, for example, with the XBLAST program, score=50, wordlength=3 to obtain amino acid sequences homologous to the proteins described in this application. Where gaps exist between two sequences, Gapped BLAST® can be utilized, for example, as described in Altschul et al., Nucleic Acids Res. 25(17):3389-3402, 1997. When utilizing BLAST® and Gapped BLAST® programs, the default parameters of the respective programs (e.g., XBLAST® and NBLAST®) can be used, or the parameters can be adjusted appropriately as would be understood by one of ordinary skill in the art.

[0105] Another local alignment technique which may be used, for example, is based on the Smith-Waterman algorithm (Smith, T. F. & Waterman, M. S. (1981) “Identification of common molecular subsequences.” J. Mol. Biol. 147:195-197). A general global alignment technique which may be used, for example, is the Needleman-Wunsch algorithm (Needleman, S. B. & Wunsch, C. D. (1970) “A general method applicable to the search for similarities in the amino acid sequences of two proteins.” J. Mol. Biol. 48:443-453), which is based on dynamic programming.

[0106] More recently, a Fast Optimal Global Sequence Alignment Algorithm (FOGSAA) was developed that purportedly produces global alignment of nucleic acid and amino acid sequences faster than other optimal global alignment methods, including the Needleman-Wunsch algorithm. In some embodiments, the identity of two polypeptides is determined by aligning the two amino acid sequences, calculating the number of identical amino acids, and dividing by the length of one of the amino acid sequences. In some embodiments, the identity of two nucleic acids is determined by aligning the two nucleotide sequences and calculating the number of identical nucleotide and dividing by the length of one of the nucleic acids.

[0107] For multiple sequence alignments, computer programs including Clustal Omega (Sievers et al., Mol Syst Biol. 2011 Oct. 11; 7:539) may be used.

[0108] In preferred embodiments, a nucleotide or amino acid sequence is found to have a specified percent identity to a reference sequence, such as a sequence disclosed in this application and/or recited in the claims when sequence identity is determined using the algorithm of Karlin and Altschul Proc. NatL. Acad. Sci. USA 87:2264-68, 1990, modified as in Karlin and Altschul Proc. Natl. Acad. Sci. USA 90:5873-77, 1993 (e.g., BLAST®, NBLAST®, XBLAST® or Gapped BLAST® programs, using default parameters of the respective programs).

[0109] In some embodiments, a nucleotide or amino acid sequence is found to have a specified percent identity to a reference sequence, such as a sequence disclosed in this application and/or recited in the claims when sequence identity is determined using the Smith-Waterman algorithm (Smith, T. F. & Waterman, M. S. (1981) “Identification of common molecular subsequences.” J. Mol. Biol. 147:195-197) or the Needleman-Wunsch algorithm (Needleman, S. B. & Wunsch, C. D. (1970) “A general method applicable to the search for similarities in the amino acid sequences of two proteins.” J. Mol. Biol. 48:443-453) using default parameters.

[0110] In some embodiments, a nucleotide or amino acid sequence, is found to have a specified percent identity to a reference sequence, such as a sequence disclosed in this application and/or recited in the claims when sequence identity is determined using a Fast Optimal Global Sequence Alignment Algorithm (FOGSAA) using default parameters.

[0111] In some embodiments, a nucleotide or amino acid sequence, is found to have a specified percent identity to a reference sequence, such as a sequence disclosed in this application and/or recited in the claims when sequence identity is determined using Clustal Omega (Sievers et al., Mol Syst Biol. 2011 Oct. 11; 7:539) using default parameters.

[0112] PTEs or PTERs associated with the disclosure may comprise wildtype sequences or may be engineered. PTEs or PTERs associated with the disclosure may comprise one or more amino acid substitutions, additions, deletions, insertions, or truncations relative to a reference sequence (e.g., relative to any one of SEQ ID NOs: 1-4 or 6). PTEs or PTERs associated with the disclosure may be naturally occurring or may be synthetic. PTEs or PTERs associated with the disclosure can include fragments or peptides of PTEs or PTERs, such as fragments or peptides that preserve the activity of a full-length PTE or PTER. PTEs or PTERs associated with the disclosure include truncated forms of PTEs or PTERs, such as truncated forms that preserve the activity of a full-length PTE or PTER.

[0113] In some embodiments, the coding sequence of a PTE or a PTER comprises a mutation at 1, 2, 3, 4, 5, 6, 7, 8, 9, 10, 11, 12, 13, 14, 15, 16, 17, 18, 19, 20, 21, 22, 23, 24, 25, 26, 27, 28, 29, 30, 31, 32, 33, 34, 35, 36, 37, 38, 39, 40, 41, 42, 43, 44, 45, 46, 47, 48, 49, 50, 51, 52, 53, 54, 55, 56, 57, 58, 59, 60, 61, 62, 63, 64, 65, 66, 67, 68, 69, 70, 71, 72, 73, 74, 75, 76, 77, 78, 79, 80, 81, 82, 83, 84, 85, 86, 87, 88, 89, 90, 91, 92, 93, 94, 95, 96, 97, 98, 99, 100 or more than 100 positions relative to a reference coding sequence. In some embodiments, the coding sequence of a PTE or a PTER comprises a mutation in 1, 2, 3, 4, 5, 6, 7, 8, 9, 10, 11, 12, 13, 14, 15, 16, 17, 18, 19, 20, 21, 22, 23, 24, 25, 26, 27, 28, 29, 30, 31, 32, 33, 34, 35, 36, 37, 38, 39, 40, 41, 42, 43, 44, 45, 46, 47, 48, 49, 50, 51, 52, 53, 54, 55, 56, 57, 58, 59, 60, 61, 62, 63, 64, 65, 66, 67, 68, 69, 70, 71, 72, 73, 74, 75, 76, 77, 78, 79, 80, 81, 82, 83, 84, 85, 86, 87, 88, 89, 90, 91, 92, 93, 94, 95, 96, 97, 98, 99, 100 or more codons of the coding sequence relative to a reference coding sequence. As will be understood by one of ordinary skill in the art, a mutation within a codon may or may not change the amino acid that is encoded by the codon due to degeneracy of the genetic code. In some embodiments, the one or more mutations in the coding sequence do not alter the amino acid sequence of the coding sequence (e.g., a PTE or a PTER) relative to the amino acid sequence of a reference polypeptide (e.g a PTE or a PTER). In other embodiments, the one or more mutations in the coding sequence do alter the amino acid sequence of the coding sequence (e.g., a PTE or a PTER) relative to the amino acid sequence of a reference polypeptide (e.g a PTE or a PTER).

[0114] In some embodiments, a PTE or PTER comprises at least 1, at least 2, at least 3, at least 4, at least 5, at least 6, at least 7, at least 8, at least 9, at least 10, at least 11, at least 12, at least 13, at least 14, at least 15, at least 16, at least 17, at least 18, at least 19, at least 20, at least 21, at least 22, at least 23, at least 24, at least 25, at least 26, at least 27, at least 28, at least 29, at least 30, at least 31, at least 32, at least 33, at least 34, at least 35, at least 36, at least 37, at least 38, at least 39, at least 40, at least 41, at least 42, at least 43, at least 44, at least 45, at least 46, at least 47, at least 48, at least 49, at least 50, at least 60, at least 70, at least 80, at least 90, or at least 100 amino acid substitutions, deletions, or additions relative to any one of SEQ ID NO: 1-4 or 6, a PTE or PTER in Table 5 or 7, or a PTE or PTER otherwise described in this disclosure.

[0115] In some embodiments, a PTE or PTER provided in this disclosure comprises an amino acid sequence that is at least 5%, at least 10%, at least 15%, at least 20%, at least 25%, at least 30%, at least 35%, at least 40%, at least 45%, at least 50%, at least 55%, at least 60%, at least 65%, at least 70%, at least 71%, at least 72%, at least 73%, at least 74%, at least 75%, at least 76%, at least 77%, at least 78%, at least 79%, at least 80%, at least 81%, at least 82%, at least 83%, at least 84%, at least 85%, at least 86%, at least 87%, at least 88%, at least 89%, at least 90%, at least 91%, at least 92%, at least 93%, at least 94%, at least 95%, at least 96%, at least 97%, at least 98%, at least 99%, or 100% identical to any one of SEQ ID NOs: 36-956.

[0116] In some embodiments, a PTE comprises: T at a residue corresponding to residue 22 in SEQ ID NO: 1; S at a residue corresponding to residue 22 in SEQ ID NO: 1; D at a residue corresponding to residue 23 in SEQ ID NO: 1; N at a residue corresponding to residue 24 in SEQ ID NO: 1; I at a residue corresponding to residue 25 in SEQ ID NO: 1; M at a residue corresponding to residue 25 in SEQ ID NO: 1; M at a residue corresponding to residue 27 in SEQ ID NO: 1; K at a residue corresponding to residue 27 in SEQ ID NO: 1; H at a residue corresponding to residue 27 in SEQ ID NO: 1; T at a residue corresponding to residue 27 in SEQ ID NO: 1; C at a residue corresponding to residue 27 in SEQ ID NO: 1; W at a residue corresponding to residue 27 in SEQ ID NO: 1; R at a residue corresponding to residue 27 in SEQ ID NO: 1; F at a residue corresponding to residue 27 in SEQ ID NO: 1; E at a residue corresponding to residue 27 in SEQ ID NO: 1; N at a residue corresponding to residue 27 in SEQ ID NO: 1; Y at a residue corresponding to residue 27 in SEQ ID NO: 1; Q at a residue corresponding to residue 27 in SEQ ID NO: 1; P at a residue corresponding to residue 27 in SEQ ID NO: 1; D at a residue corresponding to residue 27 in SEQ ID NO: 1; I at a residue corresponding to residue 66 in SEQ ID NO: 1; N at a residue corresponding to residue 68 in SEQ ID NO: 1; M at a residue corresponding to residue 68 in SEQ ID NO: 1; Q at a residue corresponding to residue 68 in SEQ ID NO: 1; A at a residue corresponding to residue 68 in SEQ ID NO: 1; C at a residue corresponding to residue 68 in SEQ ID NO: 1; S at a residue corresponding to residue 69 in SEQ ID NO: 1; Q at a residue corresponding to residue 69 in SEQ ID NO: 1; C at a residue corresponding to residue 70 in SEQ ID NO: 1; P at a residue corresponding to residue 70 in SEQ ID NO: 1; T at a residue corresponding to residue 70 in SEQ ID NO: 1; H at a residue corresponding to residue 73 in SEQ ID NO: 1; M at a residue corresponding to residue 73 in SEQ ID NO: 1; C at a residue corresponding to residue 73 in SEQ ID NO: 1; W at a residue corresponding to residue 98 in SEQ ID NO: 1; F at a residue corresponding to residue 98 in SEQ ID NO: 1; H at a residue corresponding to residue 98 in SEQ ID NO: 1; I at a residue corresponding to residue 144 in SEQ ID NO: 1; S at a residue corresponding to residue 145 in SEQ ID NO: 1; R at a residue corresponding to residue 145 in SEQ ID NO: 1; E at a residue corresponding to residue 145 in SEQ ID NO: 1; C at a residue corresponding to residue 145 in SEQ ID NO: 1; F at a residue corresponding to residue 146 in SEQ ID NO: 1; G at a residue corresponding to residue 147 in SEQ ID NO: 1; F at a residue corresponding to residue 147 in SEQ ID NO: 1; M at a residue corresponding to residue 148 in SEQ ID NO: 1; V at a residue corresponding to residue 148 in SEQ ID NO: 1; C at a residue corresponding to residue 148 in SEQ ID NO: 1; I at a residue corresponding to residue 164 in SEQ ID NO: 1; Y at a residue corresponding to residue 176 in SEQ ID NO: 1; I at a residue corresponding to residue 176 in SEQ ID NO: 1; C at a residue corresponding to residue 176 in SEQ ID NO: 1; H at a residue corresponding to residue 176 in SEQ ID NO: 1; F at a residue corresponding to residue 176 in SEQ ID NO: 1; W at a residue corresponding to residue 176 in SEQ ID NO: 1; M at a residue corresponding to residue 176 in SEQ ID NO: 1; T at a residue corresponding to residue 176 in SEQ ID NO: 1; V at a residue corresponding to residue 176 in SEQ ID NO: 1; V at a residue corresponding to residue 177 in SEQ ID NO: 1; L at a residue corresponding to residue 177 in SEQ ID NO: 1; C at a residue corresponding to residue 177 in SEQ ID NO: 1; S at a residue corresponding to residue 178 in SEQ ID NO: 1; A at a residue corresponding to residue 178 in SEQ ID NO: 1; T at a residue corresponding to residue 178 in SEQ ID NO: 1; C at a residue corresponding to residue 179 in SEQ ID NO: 1; V at a residue corresponding to residue 179 in SEQ ID NO: 1; S at a residue corresponding to residue 179 in SEQ ID NO: 1; E at a residue corresponding to residue 179 in SEQ ID NO: 1; P at a residue corresponding to residue 181 in SEQ ID NO: 1; H at a residue corresponding to residue 181 in SEQ ID NO: 1; S at a residue corresponding to residue 181 in SEQ ID NO: 1; C at a residue corresponding to residue 181 in SEQ ID NO: 1; A at a residue corresponding to residue 206 in SEQ ID NO: 1; M at a residue corresponding to residue 206 in SEQ ID NO: 1; S at a residue corresponding to residue 206 in SEQ ID NO: 1; C at a residue corresponding to residue 208 in SEQ ID NO: 1; T at a residue corresponding to residue 208 in SEQ ID NO: 1; Q at a residue corresponding to residue 208 in SEQ ID NO: 1; A at a residue corresponding to residue 208 in SEQ ID NO: 1; N at a residue corresponding to residue 209 in SEQ ID NO: 1; T at a residue corresponding to residue 210 in SEQ ID NO: 1; E at a residue corresponding to residue 210 in SEQ ID NO: 1; S at a residue corresponding to residue 210 in SEQ ID NO: 1; A at a residue corresponding to residue 228 in SEQ ID NO: 1; E at a residue corresponding to residue 228 in SEQ ID NO: 1; S at a residue corresponding to residue 228 in SEQ ID NO: 1; H at a residue corresponding to residue 228 in SEQ ID NO: 1; P at a residue corresponding to residue 230 in SEQ ID NO: 1; L at a residue corresponding to residue 231 in SEQ ID NO: 1; G at a residue corresponding to residue 231 in SEQ ID NO: 1; H at a residue corresponding to residue 231 in SEQ ID NO: 1; M at a residue corresponding to residue 231 in SEQ ID NO: 1; W at a residue corresponding to residue 231 in SEQ ID NO: 1; T at a residue corresponding to residue 231 in SEQ ID NO: 1; Q at a residue corresponding to residue 231 in SEQ ID NO: 1; C at a residue corresponding to residue 262 in SEQ ID NO: 1; S at a residue corresponding to residue 263 in SEQ ID NO: 1; N at a residue corresponding to residue 263 in SEQ ID NO: 1; T at a residue corresponding to residue 263 in SEQ ID NO: 1; C at a residue corresponding to residue 263 in SEQ ID NO: 1; F at a residue corresponding to residue 263 in SEQ ID NO: 1; M at a residue corresponding to residue 263 in SEQ ID NO: 1; N at a residue corresponding to residue 264 in SEQ ID NO: 1; S at a residue corresponding to residue 264 in SEQ ID NO: 1; P at a residue corresponding to residue 264 in SEQ ID NO: 1; T at a residue corresponding to residue 265 in SEQ ID NO: 1; F at a residue corresponding to residue 265 in SEQ ID NO: 1; W at a residue corresponding to residue 265 in SEQ ID NO: 1; C at a residue corresponding to residue 265 in SEQ ID NO: 1; L at a residue corresponding to residue 265 in SEQ ID NO: 1; M at a residue corresponding to residue 265 in SEQ ID NO: 1; Y at a residue corresponding to residue 265 in SEQ ID NO: 1; A at a residue corresponding to residue 266 in SEQ ID NO: 1; M at a residue corresponding to residue 266 in SEQ ID NO: 1; G at a residue corresponding to residue 266 in SEQ ID NO: 1; S at a residue corresponding to residue 266 in SEQ ID NO: 1; W at a residue corresponding to residue 266 in SEQ ID NO: 1; T at a residue corresponding to residue 266 in SEQ ID NO: 1; A at a residue corresponding to residue 267 in SEQ ID NO: 1; T at a residue corresponding to residue 267 in SEQ ID NO: 1; W at a residue corresponding to residue 267 in SEQ ID NO: 1; D at a residue corresponding to residue 284 in SEQ ID NO: 1; Y at a residue corresponding to residue 284 in SEQ ID NO: 1; Q at a residue corresponding to residue 284 in SEQ ID NO: 1; I at a residue corresponding to residue 284 in SEQ ID NO: 1; N at a residue corresponding to residue 284 in SEQ ID NO: 1; C at a residue corresponding to residue 284 in SEQ ID NO: 1; P at a residue corresponding to residue 284 in SEQ ID NO: 1; H at a residue corresponding to residue 284 in SEQ ID NO: 1; R at a residue corresponding to residue 284 in SEQ ID NO: 1; K at a residue corresponding to residue 284 in SEQ ID NO: 1; F at a residue corresponding to residue 284 in SEQ ID NO: 1; W at a residue corresponding to residue 286 in SEQ ID NO: 1; and/or M at a residue corresponding to residue 286 in SEQ ID NO: 1.

[0117] In some embodiments, a PTE comprises: K at a residue corresponding to residue 2 in SEQ ID NO: 2; T at a residue corresponding to residue 2 in SEQ ID NO: 2; A at a residue corresponding to residue 2 in SEQ ID NO: 2; T at a residue corresponding to residue 3 in SEQ ID NO: 2; K at a residue corresponding to residue 3 in SEQ ID NO: 2; Q at a residue corresponding to residue 3 in SEQ ID NO: 2; V at a residue corresponding to residue 4 in SEQ ID NO: 2; I at a residue corresponding to residue 4 in SEQ ID NO: 2; Q at a residue corresponding to residue 5 in SEQ ID NO: 2; M at a residue corresponding to residue 5 in SEQ ID NO: 2; R at a residue corresponding to residue 5 in SEQ ID NO: 2; T at a residue corresponding to residue 8 in SEQ ID NO: 2; L at a residue corresponding to residue 8 in SEQ ID NO: 2; C at a residue corresponding to residue 8 in SEQ ID NO: 2; P at a residue corresponding to residue 10 in SEQ ID NO: 2; P at a residue corresponding to residue 12 in SEQ ID NO: 2; E at a residue corresponding to residue 12 in SEQ ID NO: 2; P at a residue corresponding to residue 13 in SEQ ID NO: 2; A at a residue corresponding to residue 13 in SEQ ID NO: 2; S at a residue corresponding to residue 14 in SEQ ID NO: 2; E at a residue corresponding to residue 14 in SEQ ID NO: 2; D at a residue corresponding to residue 14 in SEQ ID NO: 2; Q at a residue corresponding to residue 15 in SEQ ID NO: 2; E at a residue corresponding to residue 15 in SEQ ID NO: 2; D at a residue corresponding to residue 15 in SEQ ID NO: 2; M at a residue corresponding to residue 16 in SEQ ID NO: 2; I at a residue corresponding to residue 18 in SEQ ID NO: 2; M at a residue corresponding to residue 18 in SEQ ID NO: 2; D at a residue corresponding to residue 28 in SEQ ID NO: 2; S at a residue corresponding to residue 29 in SEQ ID NO: 2; W at a residue corresponding to residue 30 in SEQ ID NO: 2; S at a residue corresponding to residue 30 in SEQ ID NO: 2; P at a residue corresponding to residue 30 in SEQ ID NO: 2; G at a residue corresponding to residue 31 in SEQ ID NO: 2; V at a residue corresponding to residue 32 in SEQ ID NO: 2; M at a residue corresponding to residue 32 in SEQ ID NO: 2; F at a residue corresponding to residue 32 in SEQ ID NO: 2; W at a residue corresponding to residue 32 in SEQ ID NO: 2; W at a residue corresponding to residue 33 in SEQ ID NO: 2; Q at a residue corresponding to residue 34 in SEQ ID NO: 2; D at a residue corresponding to residue 35 in SEQ ID NO: 2; H at a residue corresponding to residue 36 in SEQ ID NO: 2; F at a residue corresponding to residue 36 in SEQ ID NO: 2; W at a residue corresponding to residue 36 in SEQ ID NO: 2; D at a residue corresponding to residue 38 in SEQ ID NO: 2; H at a residue corresponding to residue 38 in SEQ ID NO: 2; P at a residue corresponding to residue 39 in SEQ ID NO: 2; F at a residue corresponding to residue 40 in SEQ ID NO: 2; N at a residue corresponding to residue 42 in SEQ ID NO: 2; D at a residue corresponding to residue 43 in SEQ ID NO: 2; N at a residue corresponding to residue 44 in SEQ ID NO: 2; E at a residue corresponding to residue 44 in SEQ ID NO: 2; I at a residue corresponding to residue 47 in SEQ ID NO: 2; M at a residue corresponding to residue 47 in SEQ ID NO: 2; W at a residue corresponding to residue 48 in SEQ ID NO: 2; E at a residue corresponding to residue 48 in SEQ ID NO: 2; C at a residue corresponding to residue 49 in SEQ ID NO: 2; W at a residue corresponding to residue 49 in SEQ ID NO: 2; H at a residue corresponding to residue 49 in SEQ ID NO: 2; M at a residue corresponding to residue 49 in SEQ ID NO: 2; I at a residue corresponding to residue 51 in SEQ ID NO: 2; L at a residue corresponding to residue 51 in SEQ ID NO: 2; R at a residue corresponding to residue 52 in SEQ ID NO: 2; E at a residue corresponding to residue 53 in SEQ ID NO: 2; Q at a residue corresponding to residue 53 in SEQ ID NO: 2; K at a residue corresponding to residue 55 in SEQ ID NO: 2; Q at a residue corresponding to residue 56 in SEQ ID NO: 2; R at a residue corresponding to residue 56 in SEQ ID NO: 2; D at a residue corresponding to residue 56 in SEQ ID NO: 2; Y at a residue corresponding to residue 57 in SEQ ID NO: 2; F at a residue corresponding to residue 57 in SEQ ID NO: 2; E at a residue corresponding to residue 59 in SEQ ID NO: 2; Q at a residue corresponding to residue 59 in SEQ ID NO: 2; A at a residue corresponding to residue 60 in SEQ ID NO: 2; H at a residue corresponding to residue 60 in SEQ ID NO: 2; N at a residue corresponding to residue 63 in SEQ ID NO: 2; S at a residue corresponding to residue 64 in SEQ ID NO: 2; D at a residue corresponding to residue 72 in SEQ ID NO: 2; R at a residue corresponding to residue 74 in SEQ ID NO: 2; D at a residue corresponding to residue 76 in SEQ ID NO: 2; N at a residue corresponding to residue 76 in SEQ ID NO: 2; V at a residue corresponding to residue 77 in SEQ ID NO: 2; P at a residue corresponding to residue 77 in SEQ ID NO: 2; E at a residue corresponding to residue 78 in SEQ ID NO: 2; D at a residue corresponding to residue 78 in SEQ ID NO: 2; L at a residue corresponding to residue 80 in SEQ ID NO: 2; M at a residue corresponding to residue 80 in SEQ ID NO: 2; V at a residue corresponding to residue 80 in SEQ ID NO: 2; R at a residue corresponding to residue 81 in SEQ ID NO: 2; K at a residue corresponding to residue 82 in SEQ ID NO: 2; E at a residue corresponding to residue 82 in SEQ ID NO: 2; I at a residue corresponding to residue 83 in SEQ ID NO: 2; L at a residue corresponding to residue 83 in SEQ ID NO: 2; S at a residue corresponding to residue 84 in SEQ ID NO: 2; R at a residue corresponding to residue 85 in SEQ ID NO: 2; E at a residue corresponding to residue 85 in SEQ ID NO: 2; R at a residue corresponding to residue 86 in SEQ ID NO: 2; S at a residue corresponding to residue 87 in SEQ ID NO: 2; G at a residue corresponding to residue 88 in SEQ ID NO: 2; V at a residue corresponding to residue 89 in SEQ ID NO: 2; M at a residue corresponding to residue 89 in SEQ ID NO: 2; H at a residue corresponding to residue 90 in SEQ ID NO: 2; V at a residue corresponding to residue 91 in SEQ ID NO: 2; I at a residue corresponding to residue 92 in SEQ ID NO: 2; C at a residue corresponding to residue 93 in SEQ ID NO: 2; C at a residue corresponding to residue 99 in SEQ ID NO: 2; Y at a residue corresponding to residue 103 in SEQ ID NO: 2; W at a residue corresponding to residue 103 in SEQ ID NO: 2; H at a residue corresponding to residue 103 in SEQ ID NO: 2; W at a residue corresponding to residue 105 in SEQ ID NO: 2; H at a residue corresponding to residue 106 in SEQ ID NO: 2; W at a residue corresponding to residue 106 in SEQ ID NO: 2; F at a residue corresponding to residue 106 in SEQ ID NO: 2; M at a residue corresponding to residue 107 in SEQ ID NO: 2; Y at a residue corresponding to residue 107 in SEQ ID NO: 2; W at a residue corresponding to residue 107 in SEQ ID NO: 2; R at a residue corresponding to residue 108 in SEQ ID NO: 2; W at a residue corresponding to residue 109 in SEQ ID NO: 2; F at a residue corresponding to residue 109 in SEQ ID NO: 2; W at a residue corresponding to residue 110 in SEQ ID NO: 2; M at a residue corresponding to residue 110 in SEQ ID NO: 2; D at a residue corresponding to residue 115 in SEQ ID NO: 2; T at a residue corresponding to residue 118 in SEQ ID NO: 2; S at a residue corresponding to residue 118 in SEQ ID NO: 2; D at a residue corresponding to residue 120 in SEQ ID NO: 2; E at a residue corresponding to residue 121 in SEQ ID NO: 2; Q at a residue corresponding to residue 121 in SEQ ID NO: 2; L at a residue corresponding to residue 122 in SEQ ID NO: 2; I at a residue corresponding to residue 122 in SEQ ID NO: 2; A at a residue corresponding to residue 123 in SEQ ID NO: 2; E at a residue corresponding to residue 124 in SEQ ID NO: 2; I at a residue corresponding to residue 127 in SEQ ID NO: 2; N at a residue corresponding to residue 128 in SEQ ID NO: 2; H at a residue corresponding to residue 128 in SEQ ID NO: 2; D at a residue corresponding to residue 132 in SEQ ID NO: 2; E at a residue corresponding to residue 132 in SEQ ID NO: 2; V at a residue corresponding to residue 134 in SEQ ID NO: 2; G at a residue corresponding to residue 135 in SEQ ID NO: 2; E at a residue corresponding to residue 135 in SEQ ID NO: 2; G at a residue corresponding to residue 136 in SEQ ID NO: 2; V at a residue corresponding to residue 139 in SEQ ID NO: 2; H at a residue corresponding to residue 140 in SEQ ID NO: 2; R at a residue corresponding to residue 140 in SEQ ID NO: 2; S at a residue corresponding to residue 150 in SEQ ID NO: 2; Y at a residue corresponding to residue 150 in SEQ ID NO: 2; H at a residue corresponding to residue 150 in SEQ ID NO: 2; W at a residue corresponding to residue 151 in SEQ ID NO: 2; N at a residue corresponding to residue 151 in SEQ ID NO: 2; D at a residue corresponding to residue 151 in SEQ ID NO: 2; H at a residue corresponding to residue 151 in SEQ ID NO: 2; I at a residue corresponding to residue 153 in SEQ ID NO: 2; W at a residue corresponding to residue 153 in SEQ ID NO: 2; D at a residue corresponding to residue 155 in SEQ ID NO: 2; E at a residue corresponding to residue 155 in SEQ ID NO: 2; W at a residue corresponding to residue 156 in SEQ ID NO: 2; E at a residue corresponding to residue 157 in SEQ ID NO: 2; H at a residue corresponding to residue 158 in SEQ ID NO: 2; C at a residue corresponding to residue 165 in SEQ ID NO: 2; R at a residue corresponding to residue 166 in SEQ ID NO: 2; Q at a residue corresponding to residue 168 in SEQ ID NO: 2; D at a residue corresponding to residue 182 in SEQ ID NO: 2; T at a residue corresponding to residue 183 in SEQ ID NO: 2; F at a residue corresponding to residue 187 in SEQ ID NO: 2; M at a residue corresponding to residue 187 in SEQ ID NO: 2; H at a residue corresponding to residue 187 in SEQ ID NO: 2; C at a residue corresponding to residue 188 in SEQ ID NO: 2; W at a residue corresponding to residue 188 in SEQ ID NO: 2; I at a residue corresponding to residue 190 in SEQ ID NO: 2; L at a residue corresponding to residue 190 in SEQ ID NO: 2; R at a residue corresponding to residue 191 in SEQ ID NO: 2; L at a residue corresponding to residue 193 in SEQ ID NO: 2; D at a residue corresponding to residue 194 in SEQ ID NO: 2; D at a residue corresponding to residue 195 in SEQ ID NO: 2; P at a residue corresponding to residue 200 in SEQ ID NO: 2; N at a residue corresponding to residue 201 in SEQ ID NO: 2; H at a residue corresponding to residue 202 in SEQ ID NO: 2; K at a residue corresponding to residue 202 in SEQ ID NO: 2; C at a residue corresponding to residue 203 in SEQ ID NO: 2; I at a residue corresponding to residue 203 in SEQ ID NO: 2; M at a residue corresponding to residue 214 in SEQ ID NO: 2; H at a residue corresponding to residue 214 in SEQ ID NO: 2; D at a residue corresponding to residue 215 in SEQ ID NO: 2; E at a residue corresponding to residue 215 in SEQ ID NO: 2; D at a residue corresponding to residue 219 in SEQ ID NO: 2; M at a residue corresponding to residue 220 in SEQ ID NO: 2; V at a residue corresponding to residue 220 in SEQ ID NO: 2; I at a residue corresponding to residue 220 in SEQ ID NO: 2; M at a residue corresponding to residue 221 in SEQ ID NO: 2; A at a residue corresponding to residue 221 in SEQ ID NO: 2; C at a residue corresponding to residue 221 in SEQ ID NO: 2; H at a residue corresponding to residue 222 in SEQ ID NO: 2; R at a residue corresponding to residue 223 in SEQ ID NO: 2; C at a residue corresponding to residue 225 in SEQ ID NO: 2; W at a residue corresponding to residue 226 in SEQ ID NO: 2; V at a residue corresponding to residue 227 in SEQ ID NO: 2; I at a residue corresponding to residue 227 in SEQ ID NO: 2; C at a residue corresponding to residue 235 in SEQ ID NO: 2; K at a residue corresponding to residue 236 in SEQ ID NO: 2; H at a residue corresponding to residue 236 in SEQ ID NO: 2; W at a residue corresponding to residue 236 in SEQ ID NO: 2; Y at a residue corresponding to residue 238 in SEQ ID NO: 2; H at a residue corresponding to residue 238 in SEQ ID NO: 2; M at a residue corresponding to residue 238 in SEQ ID NO: 2; S at a residue corresponding to residue 239 in SEQ ID NO: 2; D at a residue corresponding to residue 240 in SEQ ID NO: 2; W at a residue corresponding to residue 240 in SEQ ID NO: 2; Y at a residue corresponding to residue 240 in SEQ ID NO: 2; D at a residue corresponding to residue 241 in SEQ ID NO: 2; E at a residue corresponding to residue 242 in SEQ ID NO: 2; C at a residue corresponding to residue 244 in SEQ ID NO: 2; D at a residue corresponding to residue 245 in SEQ ID NO: 2; R at a residue corresponding to residue 245 in SEQ ID NO: 2; E at a residue corresponding to residue 245 in SEQ ID NO: 2; M at a residue corresponding to residue 246 in SEQ ID NO: 2; L at a residue corresponding to residue 246 in SEQ ID NO: 2; L at a residue corresponding to residue 247 in SEQ ID NO: 2; I at a residue corresponding to residue 247 in SEQ ID NO: 2; E at a residue corresponding to residue 249 in SEQ ID NO: 2; W at a residue corresponding to residue 249 in SEQ ID NO: 2; R at a residue corresponding to residue 249 in SEQ ID NO: 2; H at a residue corresponding to residue 249 in SEQ ID NO: 2; L at a residue corresponding to residue 250 in SEQ ID NO: 2; V at a residue corresponding to residue 251 in SEQ ID NO: 2; I at a residue corresponding to residue 251 in SEQ ID NO: 2; H at a residue corresponding to residue 252 in SEQ ID NO: 2; N at a residue corresponding to residue 253 in SEQ ID NO: 2; Y at a residue corresponding to residue 255 in SEQ ID NO: 2; W at a residue corresponding to residue 255 in SEQ ID NO: 2; R at a residue corresponding to residue 258 in SEQ ID NO: 2; H at a residue corresponding to residue 258 in SEQ ID NO: 2; I at a residue corresponding to residue 259 in SEQ ID NO: 2; G at a residue corresponding to residue 271 in SEQ ID NO: 2; H at a residue corresponding to residue 272 in SEQ ID NO: 2; W at a residue corresponding to residue 272 in SEQ ID NO: 2; M at a residue corresponding to residue 272 in SEQ ID NO: 2; C at a residue corresponding to residue 272 in SEQ ID NO: 2; G at a residue corresponding to residue 274 in SEQ ID NO: 2; W at a residue corresponding to residue 274 in SEQ ID NO: 2; K at a residue corresponding to residue 275 in SEQ ID NO: 2; W at a residue corresponding to residue 276 in SEQ ID NO: 2; W at a residue corresponding to residue 277 in SEQ ID NO: 2; R at a residue corresponding to residue 278 in SEQ ID NO: 2; K at a residue corresponding to residue 279 in SEQ ID NO: 2; R at a residue corresponding to residue 279 in SEQ ID NO: 2; H at a residue corresponding to residue 279 in SEQ ID NO: 2; F at a residue corresponding to residue 281 in SEQ ID NO: 2; Y at a residue corresponding to residue 281 in SEQ ID NO: 2; G at a residue corresponding to residue 282 in SEQ ID NO: 2; D at a residue corresponding to residue 283 in SEQ ID NO: 2; G at a residue corresponding to residue 283 in SEQ ID NO: 2; G at a residue corresponding to residue 285 in SEQ ID NO: 2; T at a residue corresponding to residue 287 in SEQ ID NO: 2; F at a residue corresponding to residue 288 in SEQ ID NO: 2; Y at a residue corresponding to residue 288 in SEQ ID NO: 2; L at a residue corresponding to residue 289 in SEQ ID NO: 2; V at a residue corresponding to residue 289 in SEQ ID NO: 2; L at a residue corresponding to residue 290 in SEQ ID NO: 2; F at a residue corresponding to residue 290 in SEQ ID NO: 2; D at a residue corresponding to residue 291 in SEQ ID NO: 2; E at a residue corresponding to residue 291 in SEQ ID NO: 2; T at a residue corresponding to residue 291 in SEQ ID NO: 2; R at a residue corresponding to residue 291 in SEQ ID NO: 2; N at a residue corresponding to residue 292 in SEQ ID NO: 2; R at a residue corresponding to residue 292 in SEQ ID NO: 2; I at a residue corresponding to residue 293 in SEQ ID NO: 2; F at a residue corresponding to residue 293 in SEQ ID NO: 2; L at a residue corresponding to residue 294 in SEQ ID NO: 2; V at a residue corresponding to residue 294 in SEQ ID NO: 2; R at a residue corresponding to residue 296 in SEQ ID NO: 2; M at a residue corresponding to residue 296 in SEQ ID NO: 2; M at a residue corresponding to residue 298 in SEQ ID NO: 2; R at a residue corresponding to residue 298 in SEQ ID NO: 2; K at a residue corresponding to residue 299 in SEQ ID NO: 2; R at a residue corresponding to residue 299 in SEQ ID NO: 2; Q at a residue corresponding to residue 299 in SEQ ID NO: 2; A at a residue corresponding to residue 300 in SEQ ID NO: 2; D at a residue corresponding to residue 303 in SEQ ID NO: 2; S at a residue corresponding to residue 303 in SEQ ID NO: 2; Q at a residue corresponding to residue 304 in SEQ ID NO: 2; E at a residue corresponding to residue 304 in SEQ ID NO: 2; D at a residue corresponding to residue 305 in SEQ ID NO: 2; A at a residue corresponding to residue 305 in SEQ ID NO: 2; D at a residue corresponding to residue 306 in SEQ ID NO: 2; E at a residue corresponding to residue 306 in SEQ ID NO: 2; V at a residue corresponding to residue 307 in SEQ ID NO: 2; I at a residue corresponding to residue 307 in SEQ ID NO: 2; E at a residue corresponding to residue 308 in SEQ ID NO: 2; N at a residue corresponding to residue 308 in SEQ ID NO: 2; R at a residue corresponding to residue 308 in SEQ ID NO: 2; K at a residue corresponding to residue 309 in SEQ ID NO: 2; Q at a residue corresponding to residue 309 in SEQ ID NO: 2; R at a residue corresponding to residue 309 in SEQ ID NO: 2; M at a residue corresponding to residue 311 in SEQ ID NO: 2; T at a residue corresponding to residue 311 in SEQ ID NO: 2; F at a residue corresponding to residue 311 in SEQ ID NO: 2; I at a residue corresponding to residue 312 in SEQ ID NO: 2; E at a residue corresponding to residue 313 in SEQ ID NO: 2; A at a residue corresponding to residue 316 in SEQ ID NO: 2; K at a residue corresponding to residue 316 in SEQ ID NO: 2; Q at a residue corresponding to residue 316 in SEQ ID NO: 2; N at a residue corresponding to residue 317 in SEQ ID NO: 2; K at a residue corresponding to residue 317 in SEQ ID NO: 2; L at a residue corresponding to residue 318 in SEQ ID NO: 2; F at a residue corresponding to residue 318 in SEQ ID NO: 2; M at a residue corresponding to residue 318 in SEQ ID NO: 2; S at a residue corresponding to residue 320 in SEQ ID NO: 2; Q at a residue corresponding to residue 320 in SEQ ID NO: 2; D at a residue corresponding to residue 320 in SEQ ID NO: 2; R at a residue corresponding to residue 322 in SEQ ID NO: 2; K at a residue corresponding to residue 322 in SEQ ID NO: 2; E at a residue corresponding to residue 322 in SEQ ID NO: 2; P at a residue corresponding to residue 324 in SEQ ID NO: 2; S at a residue corresponding to residue 324 in SEQ ID NO: 2; H at a residue corresponding to residue 325 in SEQ ID NO: 2; W at a residue corresponding to residue 325 in SEQ ID NO: 2; F at a residue corresponding to residue 325 in SEQ ID NO: 2; Q at a residue corresponding to residue 326 in SEQ ID NO: 2; K at a residue corresponding to residue 326 in SEQ ID NO: 2; and/or R at a residue corresponding to residue 326 in SEQ ID NO: 2.

[0118] In some embodiments, a PTE comprises: T at a residue corresponding to residue 22 in SEQ ID NO: 3; N at a residue corresponding to residue 22 in SEQ ID NO: 3; S at a residue corresponding to residue 22 in SEQ ID NO: 3; D at a residue corresponding to residue 23 in SEQ ID NO: 3; N at a residue corresponding to residue 24 in SEQ ID NO: 3; T at a residue corresponding to residue 25 in SEQ ID NO: 3; C at a residue corresponding to residue 25 in SEQ ID NO: 3; I at a residue corresponding to residue 25 in SEQ ID NO: 3; A at a residue corresponding to residue 25 in SEQ ID NO: 3; F at a residue corresponding to residue 27 in SEQ ID NO: 3; W at a residue corresponding to residue 27 in SEQ ID NO: 3; C at a residue corresponding to residue 27 in SEQ ID NO: 3; L at a residue corresponding to residue 27 in SEQ ID NO: 3; V at a residue corresponding to residue 27 in SEQ ID NO: 3; T at a residue corresponding to residue 27 in SEQ ID NO: 3; Y at a residue corresponding to residue 27 in SEQ ID NO: 3; M at a residue corresponding to residue 27 in SEQ ID NO: 3; P at a residue corresponding to residue 68 in SEQ ID NO: 3; N at a residue corresponding to residue 68 in SEQ ID NO: 3; M at a residue corresponding to residue 68 in SEQ ID NO: 3; A at a residue corresponding to residue 68 in SEQ ID NO: 3; Q at a residue corresponding to residue 68 in SEQ ID NO: 3; S at a residue corresponding to residue 69 in SEQ ID NO: 3; P at a residue corresponding to residue 70 in SEQ ID NO: 3; C at a residue corresponding to residue 70 in SEQ ID NO: 3; M at a residue corresponding to residue 73 in SEQ ID NO: 3; C at a residue corresponding to residue 73 in SEQ ID NO: 3; V at a residue corresponding to residue 73 in SEQ ID NO: 3; H at a residue corresponding to residue 73 in SEQ ID NO: 3; H at a residue corresponding to residue 98 in SEQ ID NO: 3; C at a residue corresponding to residue 98 in SEQ ID NO: 3; F at a residue corresponding to residue 98 in SEQ ID NO: 3; Q at a residue corresponding to residue 100 in SEQ ID NO: 3; H at a residue corresponding to residue 100 in SEQ ID NO: 3; E at a residue corresponding to residue 100 in SEQ ID NO: 3; D at a residue corresponding to residue 100 in SEQ ID NO: 3; I at a residue corresponding to residue 144 in SEQ ID NO: 3; T at a residue corresponding to residue 145 in SEQ ID NO: 3; C at a residue corresponding to residue 145 in SEQ ID NO: 3; S at a residue corresponding to residue 145 in SEQ ID NO: 3; E at a residue corresponding to residue 145 in SEQ ID NO: 3; Q at a residue corresponding to residue 145 in SEQ ID NO: 3; V at a residue corresponding to residue 146 in SEQ ID NO: 3; Y at a residue corresponding to residue 146 in SEQ ID NO: 3; L at a residue corresponding to residue 146 in SEQ ID NO: 3; I at a residue corresponding to residue 146 in SEQ ID NO: 3; W at a residue corresponding to residue 147 in SEQ ID NO: 3; H at a residue corresponding to residue 147 in SEQ ID NO: 3; C at a residue corresponding to residue 147 in SEQ ID NO: 3; W at a residue corresponding to residue 148 in SEQ ID NO: 3; I at a residue corresponding to residue 148 in SEQ ID NO: 3; A at a residue corresponding to residue 148 in SEQ ID NO: 3; V at a residue corresponding to residue 148 in SEQ ID NO: 3; Y at a residue corresponding to residue 148 in SEQ ID NO: 3; I at a residue corresponding to residue 164 in SEQ ID NO: 3; L at a residue corresponding to residue 176 in SEQ ID NO: 3; C at a residue corresponding to residue 176 in SEQ ID NO: 3; H at a residue corresponding to residue 176 in SEQ ID NO: 3; I at a residue corresponding to residue 176 in SEQ ID NO: 3; F at a residue corresponding to residue 176 in SEQ ID NO: 3; W at a residue corresponding to residue 176 in SEQ ID NO: 3; V at a residue corresponding to residue 176 in SEQ ID NO: 3; Y at a residue corresponding to residue 176 in SEQ ID NO: 3; C at a residue corresponding to residue 177 in SEQ ID NO: 3; D at a residue corresponding to residue 178 in SEQ ID NO: 3; T at a residue corresponding to residue 178 in SEQ ID NO: 3; R at a residue corresponding to residue 178 in SEQ ID NO: 3; A at a residue corresponding to residue 178 in SEQ ID NO: 3; S at a residue corresponding to residue 178 in SEQ ID NO: 3; C at a residue corresponding to residue 179 in SEQ ID NO: 3; M at a residue corresponding to residue 179 in SEQ ID NO: 3; F at a residue corresponding to residue 179 in SEQ ID NO: 3; R at a residue corresponding to residue 181 in SEQ ID NO: 3; S at a residue corresponding to residue 181 in SEQ ID NO: 3; C at a residue corresponding to residue 181 in SEQ ID NO: 3; A at a residue corresponding to residue 189 in SEQ ID NO: 3; V at a residue corresponding to residue 189 in SEQ ID NO: 3; E at a residue corresponding to residue 189 in SEQ ID NO: 3; M at a residue corresponding to residue 189 in SEQ ID NO: 3; I at a residue corresponding to residue 189 in SEQ ID NO: 3; C at a residue corresponding to residue 189 in SEQ ID NO: 3; L at a residue corresponding to residue 189 in SEQ ID NO: 3; N at a residue corresponding to residue 206 in SEQ ID NO: 3; S at a residue corresponding to residue 206 in SEQ ID NO: 3; M at a residue corresponding to residue 207 in SEQ ID NO: 3; N at a residue corresponding to residue 207 in SEQ ID NO: 3; A at a residue corresponding to residue 208 in SEQ ID NO: 3; C at a residue corresponding to residue 208 in SEQ ID NO: 3; T at a residue corresponding to residue 208 in SEQ ID NO: 3; N at a residue corresponding to residue 209 in SEQ ID NO: 3; E at a residue corresponding to residue 210 in SEQ ID NO: 3; W at a residue corresponding to residue 210 in SEQ ID NO: 3; C at a residue corresponding to residue 210 in SEQ ID NO: 3; H at a residue corresponding to residue 210 in SEQ ID NO: 3; P at a residue corresponding to residue 210 in SEQ ID NO: 3; Q at a residue corresponding to residue 228 in SEQ ID NO: 3; D at a residue corresponding to residue 228 in SEQ ID NO: 3; C at a residue corresponding to residue 228 in SEQ ID NO: 3; S at a residue corresponding to residue 228 in SEQ ID NO: 3; N at a residue corresponding to residue 230 in SEQ ID NO: 3; H at a residue corresponding to residue 231 in SEQ ID NO: 3; Q at a residue corresponding to residue 231 in SEQ ID NO: 3; M at a residue corresponding to residue 231 in SEQ ID NO: 3; W at a residue corresponding to residue 231 in SEQ ID NO: 3; T at a residue corresponding to residue 231 in SEQ ID NO: 3; N at a residue corresponding to residue 231 in SEQ ID NO: 3; I at a residue corresponding to residue 260 in SEQ ID NO: 3; G at a residue corresponding to residue 262 in SEQ ID NO: 3; Q at a residue corresponding to residue 263 in SEQ ID NO: 3; F at a residue corresponding to residue 263 in SEQ ID NO: 3; M at a residue corresponding to residue 263 in SEQ ID NO: 3; G at a residue corresponding to residue 263 in SEQ ID NO: 3; T at a residue corresponding to residue 263 in SEQ ID NO: 3; T at a residue corresponding to residue 264 in SEQ ID NO: 3; P at a residue corresponding to residue 264 in SEQ ID NO: 3; S at a residue corresponding to residue 264 in SEQ ID NO: 3; Y at a residue corresponding to residue 265 in SEQ ID NO: 3; I at a residue corresponding to residue 265 in SEQ ID NO: 3; W at a residue corresponding to residue 265 in SEQ ID NO: 3; M at a residue corresponding to residue 265 in SEQ ID NO: 3; S at a residue corresponding to residue 265 in SEQ ID NO: 3; T at a residue corresponding to residue 265 in SEQ ID NO: 3; L at a residue corresponding to residue 266 in SEQ ID NO: 3; Q at a residue corresponding to residue 266 in SEQ ID NO: 3; G at a residue corresponding to residue 266 in SEQ ID NO: 3; H at a residue corresponding to residue 266 in SEQ ID NO: 3; C at a residue corresponding to residue 266 in SEQ ID NO: 3; A at a residue corresponding to residue 266 in SEQ ID NO: 3; T at a residue corresponding to residue 266 in SEQ ID NO: 3; W at a residue corresponding to residue 266 in SEQ ID NO: 3; I at a residue corresponding to residue 266 in SEQ ID NO: 3; T at a residue corresponding to residue 267 in SEQ ID NO: 3; W at a residue corresponding to residue 267 in SEQ ID NO: 3; K at a residue corresponding to residue 284 in SEQ ID NO: 3; E at a residue corresponding to residue 284 in SEQ ID NO: 3; I at a residue corresponding to residue 284 in SEQ ID NO: 3; P at a residue corresponding to residue 284 in SEQ ID NO: 3; T at a residue corresponding to residue 284 in SEQ ID NO: 3; H at a residue corresponding to residue 284 in SEQ ID NO: 3; and/or R at a residue corresponding to residue 284 in SEQ ID NO: 3.

[0119] In some embodiments, a PTE comprises: M at a residue corresponding to residue 20 in SEQ ID NO: 4; D at a residue corresponding to residue 23 in SEQ ID NO: 4; M at a residue corresponding to residue 25 in SEQ ID NO: 4; L at a residue corresponding to residue in SEQ ID NO: 4; L at a residue corresponding to residue 26 in SEQ ID NO: 4; H at a residue corresponding to residue 26 in SEQ ID NO: 4; M at a residue corresponding to residue 26 in SEQ ID NO: 4; W at a residue corresponding to residue 26 in SEQ ID NO: 4; W at a residue corresponding to residue 27 in SEQ ID NO: 4; C at a residue corresponding to residue 27 in SEQ ID NO: 4; Y at a residue corresponding to residue 27 in SEQ ID NO: 4; T at a residue corresponding to residue 27 in SEQ ID NO: 4; V at a residue corresponding to residue 27 in SEQ ID NO: 4; F at a residue corresponding to residue 27 in SEQ ID NO: 4; M at a residue corresponding to residue 27 in SEQ ID NO: 4; I at a residue corresponding to residue 66 in SEQ ID NO: 4; M at a residue corresponding to residue 68 in SEQ ID NO: 4; A at a residue corresponding to residue 68 in SEQ ID NO: 4; C at a residue corresponding to residue 68 in SEQ ID NO: 4; N at a residue corresponding to residue 68 in SEQ ID NO: 4; S at a residue corresponding to residue 69 in SEQ ID NO: 4; Q at a residue corresponding to residue 69 in SEQ ID NO: 4; at a residue corresponding to residue 73 in SEQ ID NO: 4; C at a residue corresponding to residue 73 in SEQ ID NO: 4; C at a residue corresponding to residue 98 in SEQ ID NO: 4; W at a residue corresponding to residue 98 in SEQ ID NO: 4; C at a residue corresponding to residue 126 in SEQ ID NO: 4; L at a residue corresponding to residue 126 in SEQ ID NO: 4; M at a residue corresponding to residue 126 in SEQ ID NO: 4; I at a residue corresponding to residue 144 in SEQ ID NO: 4; Q at a residue corresponding to residue 145 in SEQ ID NO: 4; C at a residue corresponding to residue 145 in SEQ ID NO: 4; T at a residue corresponding to residue 145 in SEQ ID NO: 4; R at a residue corresponding to residue 145 in SEQ ID NO: 4; S at a residue corresponding to residue 145 in SEQ ID NO: 4; E at a residue corresponding to residue 145 in SEQ ID NO: 4; F at a residue corresponding to residue 146 in SEQ ID NO: 4; I at a residue corresponding to residue 146 in SEQ ID NO: 4; V at a residue corresponding to residue 146 in SEQ ID NO: 4; G at a residue corresponding to residue 147 in SEQ ID NO: 4; S at a residue corresponding to residue 147 in SEQ ID NO: 4; M at a residue corresponding to residue 147 in SEQ ID NO: 4; I at a residue corresponding to residue 147 in SEQ ID NO: 4; Y at a residue corresponding to residue 148 in SEQ ID NO: 4; M at a residue corresponding to residue 148 in SEQ ID NO: 4; C at a residue corresponding to residue 148 in SEQ ID NO: 4; V at a residue corresponding to residue 148 in SEQ ID NO: 4; W at a residue corresponding to residue 148 in SEQ ID NO: 4; I at a residue corresponding to residue 148 in SEQ ID NO: 4; I at a residue corresponding to residue 164 in SEQ ID NO: 4; T at a residue corresponding to residue 164 in SEQ ID NO: 4; S at a residue corresponding to residue 168 in SEQ ID NO: 4; C at a residue corresponding to residue 173 in SEQ ID NO: 4; Y at a residue corresponding to residue 176 in SEQ ID NO: 4; W at a residue corresponding to residue 176 in SEQ ID NO: 4; L at a residue corresponding to residue 176 in SEQ ID NO: 4; M at a residue corresponding to residue 176 in SEQ ID NO: 4; H at a residue corresponding to residue 176 in SEQ ID NO: 4; I at a residue corresponding to residue 176 in SEQ ID NO: 4; F at a residue corresponding to residue 176 in SEQ ID NO: 4; T at a residue corresponding to residue 176 in SEQ ID NO: 4; V at a residue corresponding to residue 177 in SEQ ID NO: 4; C at a residue corresponding to residue 177 in SEQ ID NO: 4; I at a residue corresponding to residue 177 in SEQ ID NO: 4; T at a residue corresponding to residue 178 in SEQ ID NO: 4; S at a residue corresponding to residue 178 in SEQ ID NO: 4; Q at a residue corresponding to residue 178 in SEQ ID NO: 4; Y at a residue corresponding to residue 178 in SEQ ID NO: 4; R at a residue corresponding to residue 178 in SEQ ID NO: 4; V at a residue corresponding to residue 178 in SEQ ID NO: 4; D at a residue corresponding to residue 178 in SEQ ID NO: 4; I at a residue corresponding to residue 179 in SEQ ID NO: 4; M at a residue corresponding to residue 179 in SEQ ID NO: 4; N at a residue corresponding to residue 179 in SEQ ID NO: 4; F at a residue corresponding to residue 179 in SEQ ID NO: 4; W at a residue corresponding to residue 179 in SEQ ID NO: 4; D at a residue corresponding to residue 179 in SEQ ID NO: 4; H at a residue corresponding to residue 181 in SEQ ID NO: 4; S at a residue corresponding to residue 181 in SEQ ID NO: 4; M at a residue corresponding to residue 181 in SEQ ID NO: 4; C at a residue corresponding to residue 181 in SEQ ID NO: 4; W at a residue corresponding to residue 181 in SEQ ID NO: 4; G at a residue corresponding to residue 181 in SEQ ID NO: 4; M at a residue corresponding to residue 189 in SEQ ID NO: 4; V at a residue corresponding to residue 189 in SEQ ID NO: 4; I at a residue corresponding to residue 189 in SEQ ID NO: 4; L at a residue corresponding to residue 189 in SEQ ID NO: 4; C at a residue corresponding to residue 189 in SEQ ID NO: 4; E at a residue corresponding to residue 189 in SEQ ID NO: 4; A at a residue corresponding to residue 189 in SEQ ID NO: 4; V at a residue corresponding to residue 204 in SEQ ID NO: 4; S at a residue corresponding to residue 206 in SEQ ID NO: 4; N at a residue corresponding to residue 206 in SEQ ID NO: 4; N at a residue corresponding to residue 207 in SEQ ID NO: 4; A at a residue corresponding to residue 208 in SEQ ID NO: 4; C at a residue corresponding to residue 208 in SEQ ID NO: 4; M at a residue corresponding to residue 208 in SEQ ID NO: 4; T at a residue corresponding to residue 208 in SEQ ID NO: 4; N at a residue corresponding to residue 209 in SEQ ID NO: 4; C at a residue corresponding to residue 209 in SEQ ID NO: 4; M at a residue corresponding to residue 210 in SEQ ID NO: 4; E at a residue corresponding to residue 210 in SEQ ID NO: 4; W at a residue corresponding to residue 210 in SEQ ID NO: 4; C at a residue corresponding to residue 210 in SEQ ID NO: 4; C at a residue corresponding to residue 228 in SEQ ID NO: 4; S at a residue corresponding to residue 228 in SEQ ID NO: 4; A at a residue corresponding to residue 228 in SEQ ID NO: 4; Q at a residue corresponding to residue 228 in SEQ ID NO: 4; S at a residue corresponding to residue 230 in SEQ ID NO: 4; F at a residue corresponding to residue 231 in SEQ ID NO: 4; N at a residue corresponding to residue 231 in SEQ ID NO: 4; G at a residue corresponding to residue 231 in SEQ ID NO: 4; Q at a residue corresponding to residue 231 in SEQ ID NO: 4; H at a residue corresponding to residue 231 in SEQ ID NO: 4; W at a residue corresponding to residue 231 in SEQ ID NO: 4; C at a residue corresponding to residue 231 in SEQ ID NO: 4; M at a residue corresponding to residue 231 in SEQ ID NO: 4; T at a residue corresponding to residue 231 in SEQ ID NO: 4; I at a residue corresponding to residue 260 in SEQ ID NO: 4; G at a residue corresponding to residue 262 in SEQ ID NO: 4; C at a residue corresponding to residue 262 in SEQ ID NO: 4; T at a residue corresponding to residue 263 in SEQ ID NO: 4; C at a residue corresponding to residue 263 in SEQ ID NO: 4; N at a residue corresponding to residue 263 in SEQ ID NO: 4; S at a residue corresponding to residue 263 in SEQ ID NO: 4; F at a residue corresponding to residue 263 in SEQ ID NO: 4; Y at a residue corresponding to residue 263 in SEQ ID NO: 4; F at a residue corresponding to residue 264 in SEQ ID NO: 4; N at a residue corresponding to residue 264 in SEQ ID NO: 4; M at a residue corresponding to residue 265 in SEQ ID NO: 4; V at a residue corresponding to residue 265 in SEQ ID NO: 4; W at a residue corresponding to residue 265 in SEQ ID NO: 4; S at a residue corresponding to residue 265 in SEQ ID NO: 4; T at a residue corresponding to residue 265 in SEQ ID NO: 4; C at a residue corresponding to residue 265 in SEQ ID NO: 4; Y at a residue corresponding to residue 265 in SEQ ID NO: 4; Q at a residue corresponding to residue 265 in SEQ ID NO: 4; I at a residue corresponding to residue 265 in SEQ ID NO: 4; L at a residue corresponding to residue 265 in SEQ ID NO: 4; C at a residue corresponding to residue 266 in SEQ ID NO: 4; A at a residue corresponding to residue 266 in SEQ ID NO: 4; G at a residue corresponding to residue 266 in SEQ ID NO: 4; T at a residue corresponding to residue 266 in SEQ ID NO: 4; R at a residue corresponding to residue 266 in SEQ ID NO: 4; H at a residue corresponding to residue 266 in SEQ ID NO: 4; S at a residue corresponding to residue 266 in SEQ ID NO: 4; G at a residue corresponding to residue 267 in SEQ ID NO: 4; T at a residue corresponding to residue 267 in SEQ ID NO: 4; A at a residue corresponding to residue 267 in SEQ ID NO: 4; W at a residue corresponding to residue 267 in SEQ ID NO: 4; R at a residue corresponding to residue 284 in SEQ ID NO: 4; D at a residue corresponding to residue 284 in SEQ ID NO: 4; F at a residue corresponding to residue 284 in SEQ ID NO: 4; T at a residue corresponding to residue 284 in SEQ ID NO: 4; K at a residue corresponding to residue 284 in SEQ ID NO: 4; C at a residue corresponding to residue 284 in SEQ ID NO: 4; P at a residue corresponding to residue 284 in SEQ ID NO: 4; N at a residue corresponding to residue 284 in SEQ ID NO: 4; Q at a residue corresponding to residue 284 in SEQ ID NO: 4; E at a residue corresponding to residue 284 in SEQ ID NO: 4; M at a residue corresponding to residue 284 in SEQ ID NO: 4; H at a residue corresponding to residue 284 in SEQ ID NO: 4; Y at a residue corresponding to residue 284 in SEQ ID NO: 4; F at a residue corresponding to residue 286 in SEQ ID NO: 4; M at a residue corresponding to residue 286 in SEQ ID NO: 4; and/or W at a residue corresponding to residue 286 in SEQ ID NO: 4. In some embodiments, a PTER comprises: I at a residue corresponding to residue 29 in SEQ ID NO: 6; R at a residue corresponding to residue 31 in SEQ ID NO: 6; S at a residue corresponding to residue 31 in SEQ ID NO: 6; M at a residue corresponding to residue 34 in SEQ ID NO: 6; C at a residue corresponding to residue 34 in SEQ ID NO: 6; I at a residue corresponding to residue 34 in SEQ ID NO: 6; V at a residue corresponding to residue 34 in SEQ ID NO: 6; I at a residue corresponding to residue 35 in SEQ ID NO: 6; M at a residue corresponding to residue 35 in SEQ ID NO: 6; E at a residue corresponding to residue 72 in SEQ ID NO: 6; W at a residue corresponding to residue 72 in SEQ ID NO: 6; C at a residue corresponding to residue 72 in SEQ ID NO: 6; R at a residue corresponding to residue 72 in SEQ ID NO: 6; N at a residue corresponding to residue 72 in SEQ ID NO: 6; Q at a residue corresponding to residue 72 in SEQ ID NO: 6; D at a residue corresponding to residue 72 in SEQ ID NO: 6; M at a residue corresponding to residue 72 in SEQ ID NO: 6; F at a residue corresponding to residue 72 in SEQ ID NO: 6; T at a residue corresponding to residue 73 in SEQ ID NO: 6; M at a residue corresponding to residue 73 in SEQ ID NO: 6; N at a residue corresponding to residue 73 in SEQ ID NO: 6; I at a residue corresponding to residue 73 in SEQ ID NO: 6; K at a residue corresponding to residue 73 in SEQ ID NO: 6; C at a residue corresponding to residue 73 in SEQ ID NO: 6; H at a residue corresponding to residue 73 in SEQ ID NO: 6; F at a residue corresponding to residue 74 in SEQ ID NO: 6; I at a residue corresponding to residue 74 in SEQ ID NO: 6; H at a residue corresponding to residue 74 in SEQ ID NO: 6; M at a residue corresponding to residue 74 in SEQ ID NO: 6; W at a residue corresponding to residue 74 in SEQ ID NO: 6; T at a residue corresponding to residue 75 in SEQ ID NO: 6; C at a residue corresponding to residue 75 in SEQ ID NO: 6; E at a residue corresponding to residue 75 in SEQ ID NO: 6; H at a residue corresponding to residue 75 in SEQ ID NO: 6; K at a residue corresponding to residue 75 in SEQ ID NO: 6; F at a residue corresponding to residue 75 in SEQ ID NO: 6; R at a residue corresponding to residue 75 in SEQ ID NO: 6; V at a residue corresponding to residue 95 in SEQ ID NO: 6; L at a residue corresponding to residue 95 in SEQ ID NO: 6; M at a residue corresponding to residue 95 in SEQ ID NO: 6; I at a residue corresponding to residue 96 in SEQ ID NO: 6; T at a residue corresponding to residue 96 in SEQ ID NO: 6; C at a residue corresponding to residue 96 in SEQ ID NO: 6; T at a residue corresponding to residue 98 in SEQ ID NO: 6; I at a residue corresponding to residue 98 in SEQ ID NO: 6; V at a residue corresponding to residue 98 in SEQ ID NO: 6; C at a residue corresponding to residue 98 in SEQ ID NO: 6; M at a residue corresponding to residue 98 in SEQ ID NO: 6; A at a residue corresponding to residue 98 in SEQ ID NO: 6; N at a residue corresponding to residue 99 in SEQ ID NO: 6; S at a residue corresponding to residue 99 in SEQ ID NO: 6; V at a residue corresponding to residue 100 in SEQ ID NO: 6; C at a residue corresponding to residue 100 in SEQ ID NO: 6; N at a residue corresponding to residue 100 in SEQ ID NO: 6; S at a residue corresponding to residue 100 in SEQ ID NO: 6; M at a residue corresponding to residue 103 in SEQ ID NO: 6; C at a residue corresponding to residue 103 in SEQ ID NO: 6; R at a residue corresponding to residue 104 in SEQ ID NO: 6; G at a residue corresponding to residue 104 in SEQ ID NO: 6; N at a residue corresponding to residue 106 in SEQ ID NO: 6; I at a residue corresponding to residue 110 in SEQ ID NO: 6; L at a residue corresponding to residue 127 in SEQ ID NO: 6; Y at a residue corresponding to residue 127 in SEQ ID NO: 6; H at a residue corresponding to residue 127 in SEQ ID NO: 6; H at a residue corresponding to residue 128 in SEQ ID NO: 6; V at a residue corresponding to residue 129 in SEQ ID NO: 6; Y at a residue corresponding to residue 129 in SEQ ID NO: 6; K at a residue corresponding to residue 129 in SEQ ID NO: 6; G at a residue corresponding to residue 129 in SEQ ID NO: 6; M at a residue corresponding to residue 129 in SEQ ID NO: 6; A at a residue corresponding to residue 169 in SEQ ID NO: 6; T at a residue corresponding to residue 169 in SEQ ID NO: 6; K at a residue corresponding to residue 169 in SEQ ID NO: 6; C at a residue corresponding to residue 169 in SEQ ID NO: 6; I at a residue corresponding to residue 199 in SEQ ID NO: 6; V at a residue corresponding to residue 199 in SEQ ID NO: 6; S at a residue corresponding to residue 199 in SEQ ID NO: 6; H at a residue corresponding to residue 199 in SEQ ID NO: 6; W at a residue corresponding to residue 199 in SEQ ID NO: 6; M at a residue corresponding to residue 199 in SEQ ID NO: 6; N at a residue corresponding to residue 199 in SEQ ID NO: 6; Y at a residue corresponding to residue 199 in SEQ ID NO: 6; A at a residue corresponding to residue 199 in SEQ ID NO: 6; Q at a residue corresponding to residue 199 in SEQ ID NO: 6; C at a residue corresponding to residue 200 in SEQ ID NO: 6; V at a residue corresponding to residue 200 in SEQ ID NO: 6; R at a residue corresponding to residue 201 in SEQ ID NO: 6; C at a residue corresponding to residue 201 in SEQ ID NO: 6; P at a residue corresponding to residue 204 in SEQ ID NO: 6; H at a residue corresponding to residue 204 in SEQ ID NO: 6; Y at a residue corresponding to residue 204 in SEQ ID NO: 6; M at a residue corresponding to residue 204 in SEQ ID NO: 6; G at a residue corresponding to residue 204 in SEQ ID NO: 6; N at a residue corresponding to residue 204 in SEQ ID NO: 6; C at a residue corresponding to residue 204 in SEQ ID NO: 6; E at a residue corresponding to residue 204 in SEQ ID NO: 6; A at a residue corresponding to residue 204 in SEQ ID NO: 6; V at a residue corresponding to residue 228 in SEQ ID NO: 6; L at a residue corresponding to residue 228 in SEQ ID NO: 6; M at a residue corresponding to residue 228 in SEQ ID NO: 6; C at a residue corresponding to residue 229 in SEQ ID NO: 6; N at a residue corresponding to residue 229 in SEQ ID NO: 6; T at a residue corresponding to residue 229 in SEQ ID NO: 6; S at a residue corresponding to residue 229 in SEQ ID NO: 6; L at a residue corresponding to residue 231 in SEQ ID NO: 6; I at a residue corresponding to residue 231 in SEQ ID NO: 6; V at a residue corresponding to residue 231 in SEQ ID NO: 6; C at a residue corresponding to residue 231 in SEQ ID NO: 6; E at a residue corresponding to residue 232 in SEQ ID NO: 6; N at a residue corresponding to residue 232 in SEQ ID NO: 6; G at a residue corresponding to residue 232 in SEQ ID NO: 6; I at a residue corresponding to residue 236 in SEQ ID NO: 6; F at a residue corresponding to residue 236 in SEQ ID NO: 6; M at a residue corresponding to residue 236 in SEQ ID NO: 6; W at a residue corresponding to residue 236 in SEQ ID NO: 6; L at a residue corresponding to residue 251 in SEQ ID NO: 6; M at a residue corresponding to residue 251 in SEQ ID NO: 6; N at a residue corresponding to residue 252 in SEQ ID NO: 6; A at a residue corresponding to residue 252 in SEQ ID NO: 6; G at a residue corresponding to residue 252 in SEQ ID NO: 6; Q at a residue corresponding to residue 252 in SEQ ID NO: 6; S at a residue corresponding to residue 252 in SEQ ID NO: 6; N at a residue corresponding to residue 254 in SEQ ID NO: 6; Y at a residue corresponding to residue 255 in SEQ ID NO: 6; W at a residue corresponding to residue 255 in SEQ ID NO: 6; M at a residue corresponding to residue 255 in SEQ ID NO: 6; W at a residue corresponding to residue 258 in SEQ ID NO: 6; F at a residue corresponding to residue 258 in SEQ ID NO: 6; N at a residue corresponding to residue 258 in SEQ ID NO: 6; L at a residue corresponding to residue 258 in SEQ ID NO: 6; V at a residue corresponding to residue 258 in SEQ ID NO: 6; H at a residue corresponding to residue 258 in SEQ ID NO: 6; P at a residue corresponding to residue 258 in SEQ ID NO: 6; K at a residue corresponding to residue 258 in SEQ ID NO: 6; C at a residue corresponding to residue 270 in SEQ ID NO: 6; V at a residue corresponding to residue 270 in SEQ ID NO: 6; H at a residue corresponding to residue 270 in SEQ ID NO: 6; L at a residue corresponding to residue 270 in SEQ ID NO: 6; P at a residue corresponding to residue 270 in SEQ ID NO: 6; A at a residue corresponding to residue 295 in SEQ ID NO: 6; N at a residue corresponding to residue 296 in SEQ ID NO: 6; C at a residue corresponding to residue 296 in SEQ ID NO: 6; T at a residue corresponding to residue 296 in SEQ ID NO: 6; Q at a residue corresponding to residue 296 in SEQ ID NO: 6; M at a residue corresponding to residue 296 in SEQ ID NO: 6; G at a residue corresponding to residue 297 in SEQ ID NO: 6; N at a residue corresponding to residue 297 in SEQ ID NO: 6; S at a residue corresponding to residue 297 in SEQ ID NO: 6; V at a residue corresponding to residue 298 in SEQ ID NO: 6; M at a residue corresponding to residue 298 in SEQ ID NO: 6; M at a residue corresponding to residue 299 in SEQ ID NO: 6; H at a residue corresponding to residue 299 in SEQ ID NO: 6; F at a residue corresponding to residue 299 in SEQ ID NO: 6; G at a residue corresponding to residue 299 in SEQ ID NO: 6; W at a residue corresponding to residue 299 in SEQ ID NO: 6; S at a residue corresponding to residue 299 in SEQ ID NO: 6; T at a residue corresponding to residue 299 in SEQ ID NO: 6; A at a residue corresponding to residue 299 in SEQ ID NO: 6; Q at a residue corresponding to residue 303 in SEQ ID NO: 6; and/or F at a residue corresponding to residue 312 in SEQ ID NO: 6.

[0120] In some embodiments, a PTER comprises: G at a residue corresponding to residue 31 in SEQ ID NO: 9; V at a residue corresponding to residue 98 in SEQ ID NO: 9; W at a residue corresponding to residue 128 in SEQ ID NO: 9; E at a residue corresponding to residue 129 in SEQ ID NO: 9; H at a residue corresponding to residue 200 in SEQ ID NO: 9; T at a residue corresponding to residue 201 in SEQ ID NO: 9; G at a residue corresponding to residue 229 in SEQ ID NO: 9; S at a residue corresponding to residue 231 in SEQ ID NO: 9; D at a residue corresponding to residue 233 in SEQ ID NO: 9; G at a residue corresponding to residue 255 in SEQ ID NO: 9; A at a residue corresponding to residue 171 in SEQ ID NO: 9; N at a residue corresponding to residue 173 in SEQ ID NO: 9; I at a residue corresponding to residue 228 in SEQ ID NO: 9; and/or L at a residue corresponding to residue 244 in SEQ ID NO: 9.

[0121] In some embodiments, a PTE or PTER has high hydrolase activity on VX and high hydrolase activity on VR. In some embodiments, the PTE or PTER comprises: D at a residue corresponding to residue 100 in SEQ ID NO: 3; L at a residue corresponding to residue 266 in SEQ ID NO: 3; I at a residue corresponding to residue 266 in SEQ ID NO: 3; Q at a residue corresponding to residue 100 in SEQ ID NO: 3; M at a residue corresponding to residue 266 in SEQ ID NO: 1; K at a residue corresponding to residue 236 in SEQ ID NO: 2; W at a residue corresponding to residue 151 in SEQ ID NO: 2; G at a residue corresponding to residue 266 in SEQ ID NO: 3; P at a residue corresponding to residue 70 in SEQ ID NO: 3; T at a residue corresponding to residue 266 in SEQ ID NO: 3; H at a residue corresponding to residue 103 in SEQ ID NO: 2; W at a residue corresponding to residue 272 in SEQ ID NO: 2; A at a residue corresponding to residue 266 in SEQ ID NO: 3; T at a residue corresponding to residue 266 in SEQ ID NO: 1; C at a residue corresponding to residue 266 in SEQ ID NO: 3; G at a residue corresponding to residue 266 in SEQ ID NO: 1; T at a residue corresponding to residue 266 in SEQ ID NO: 4; M at a residue corresponding to residue 263 in SEQ ID NO: 3; and/or M at a residue corresponding to residue 27 in SEQ ID NO: 3.

[0122] In some embodiments, a PTE or PTER has high hydrolase activity on VX and hydrolase activity on VR. In some embodiments, the PTE or PTER comprises: S at a residue corresponding to residue 29 in SEQ ID NO: 2; H at a residue corresponding to residue 151 in SEQ ID NO: 2; Y at a residue corresponding to residue 281 in SEQ ID NO: 2; M at a residue corresponding to residue 272 in SEQ ID NO: 2; C at a residue corresponding to residue 99 in SEQ ID NO: 2; H at a residue corresponding to residue 36 in SEQ ID NO: 2; F at a residue corresponding to residue 281 in SEQ ID NO: 2; I at a residue corresponding to residue 259 in SEQ ID NO: 2; W at a residue corresponding to residue 32 in SEQ ID NO: 2; V at a residue corresponding to residue 148 in SEQ ID NO: 4; D at a residue corresponding to residue 283 in SEQ ID NO: 2; H at a residue corresponding to residue 238 in SEQ ID NO: 2; F at a residue corresponding to residue 288 in SEQ ID NO: 2; C at a residue corresponding to residue 49 in SEQ ID NO: 2; N at a residue corresponding to residue 151 in SEQ ID NO: 2; W at a residue corresponding to residue 267 in SEQ ID NO: 3; Q at a residue corresponding to residue 266 in SEQ ID NO: 3; I at a residue corresponding to residue 83 in SEQ ID NO: 2; E at a residue corresponding to residue 291 in SEQ ID NO: 2; E at a residue corresponding to residue 121 in SEQ ID NO: 2; G at a residue corresponding to residue 31 in SEQ ID NO: 2; M at a residue corresponding to residue 147 in SEQ ID NO: 4; L at a residue corresponding to residue 290 in SEQ ID NO: 2; D at a residue corresponding to residue 151 in SEQ ID NO: 2; P at a residue corresponding to residue 30 in SEQ ID NO: 2; R at a residue corresponding to residue 191 in SEQ ID NO: 2; M at a residue corresponding to residue 89 in SEQ ID NO: 2; Y at a residue corresponding to residue 288 in SEQ ID NO: 2; L at a residue corresponding to residue 250 in SEQ ID NO: 2; I at a residue corresponding to residue 260 in SEQ ID NO: 3; F at a residue corresponding to residue 32 in SEQ ID NO: 2; I at a residue corresponding to residue 122 in SEQ ID NO: 2; Q at a residue corresponding to residue 320 in SEQ ID NO: 2; D at a residue corresponding to residue 28 in SEQ ID NO: 2; V at a residue corresponding to residue 251 in SEQ ID NO: 2; N at a residue corresponding to residue 63 in SEQ ID NO: 2; E at a residue corresponding to residue 15 in SEQ ID NO: 2; R at a residue corresponding to residue 245 in SEQ ID NO: 2; N at a residue corresponding to residue 308 in SEQ ID NO: 2; G at a residue corresponding to residue 263 in SEQ ID NO: 3; A at a residue corresponding to residue 13 in SEQ ID NO: 2; D at a residue corresponding to residue 303 in SEQ ID NO: 2; V at a residue corresponding to residue 294 in SEQ ID NO: 2; F at a residue corresponding to residue 40 in SEQ ID NO: 2; D at a residue corresponding to residue 194 in SEQ ID NO: 2; I at a residue corresponding to residue 18 in SEQ ID NO: 2; M at a residue corresponding to residue 47 in SEQ ID NO: 2; D at a residue corresponding to residue 78 in SEQ ID NO: 2; D at a residue corresponding to residue 320 in SEQ ID NO: 2; T at a residue corresponding to residue 263 in SEQ ID NO: 3; Q at a residue corresponding to residue 263 in SEQ ID NO: 3; T at a residue corresponding to residue 311 in SEQ ID NO: 2; H at a residue corresponding to residue 325 in SEQ ID NO: 2; W at a residue corresponding to residue 106 in SEQ ID NO: 2; R at a residue corresponding to residue 309 in SEQ ID NO: 2; M at a residue corresponding to residue 5 in SEQ ID NO: 2; M at a residue corresponding to residue 107 in SEQ ID NO: 2; M at a residue corresponding to residue 49 in SEQ ID NO: 2; S at a residue corresponding to residue 118 in SEQ ID NO: 2; E at a residue corresponding to residue 53 in SEQ ID NO: 2; L at a residue corresponding to residue 318 in SEQ ID NO: 2; H at a residue corresponding to residue 90 in SEQ ID NO: 2; D at a residue corresponding to residue 155 in SEQ ID NO: 2; I at a residue corresponding to residue 127 in SEQ ID NO: 2; L at a residue corresponding to residue 246 in SEQ ID NO: 2; Q at a residue corresponding to residue 304 in SEQ ID NO: 2; M at a residue corresponding to residue 16 in SEQ ID NO: 2; R at a residue corresponding to residue 292 in SEQ ID NO: 2; E at a residue corresponding to residue 78 in SEQ ID NO: 2; V at a residue corresponding to residue 148 in SEQ ID NO: 3; R at a residue corresponding to residue 85 in SEQ ID NO: 2; and/or N at a residue corresponding to residue 317 in SEQ ID NO: 2.

[0123] In some embodiments, a PTE or PTER has hydrolase activity on VX and high hydrolase activity on VR. In some embodiments, the PTE or PTER comprises: H at a residue corresponding to residue 284 in SEQ ID NO: 1; F at a residue corresponding to residue 265 in SEQ ID NO: 1; M at a residue corresponding to residue 265 in SEQ ID NO: 3; H at a residue corresponding to residue 284 in SEQ ID NO: 4; Y at a residue corresponding to residue 265 in SEQ ID NO: 4; W at a residue corresponding to residue 265 in SEQ ID NO: 3; Y at a residue corresponding to residue 284 in SEQ ID NO: 4; C at a residue corresponding to residue 284 in SEQ ID NO: 1; N at a residue corresponding to residue 284 in SEQ ID NO: 1; Y at a residue corresponding to residue 284 in SEQ ID NO: 1; W at a residue corresponding to residue 265 in SEQ ID NO: 1; A at a residue corresponding to residue 266 in SEQ ID NO: 1; M at a residue corresponding to residue 284 in SEQ ID NO: 4; W at a residue corresponding to residue 265 in SEQ ID NO: 4; M at a residue corresponding to residue 265 in SEQ ID NO: 1; F at a residue corresponding to residue 284 in SEQ ID NO: 4; G at a residue corresponding to residue 285 in SEQ ID NO: 2; A at a residue corresponding to residue 266 in SEQ ID NO: 4; C at a residue corresponding to residue 70 in SEQ ID NO: 3; W at a residue corresponding to residue 267 in SEQ ID NO: 1; L at a residue corresponding to residue 27 in SEQ ID NO: 3; G at a residue corresponding to residue 283 in SEQ ID NO: 2; N at a residue corresponding to residue 284 in SEQ ID NO: 4; and/or T at a residue corresponding to residue 284 in SEQ ID NO: 3.

[0124] In some embodiments, a PTE or PTER has hydrolase activity on VX and VR. In some embodiments, the PTE or PTER comprises: F at a residue corresponding to residue 27 in SEQ ID NO: 3; Q at a residue corresponding to residue 309 in SEQ ID NO: 2; I at a residue corresponding to residue 164 in SEQ ID NO: 3; V at a residue corresponding to residue 139 in SEQ ID NO: 2; R at a residue corresponding to residue 291 in SEQ ID NO: 2; H at a residue corresponding to residue 187 in SEQ ID NO: 2; W at a residue corresponding to residue 325 in SEQ ID NO: 2; E at a residue corresponding to residue 59 in SEQ ID NO: 2; W at a residue corresponding to residue 103 in SEQ ID NO: 2; D at a residue corresponding to residue 284 in SEQ ID NO: 1; I at a residue corresponding to residue 190 in SEQ ID NO: 2; H at a residue corresponding to residue 252 in SEQ ID NO: 2; N at a residue corresponding to residue 292 in SEQ ID NO: 2; W at a residue corresponding to residue 240 in SEQ ID NO: 2; R at a residue corresponding to residue 322 in SEQ ID NO: 2; C at a residue corresponding to residue 266 in SEQ ID NO: 4; Q at a residue corresponding to residue 299 in SEQ ID NO: 2; T at a residue corresponding to residue 265 in SEQ ID NO: 3; H at a residue corresponding to residue 49 in SEQ ID NO: 2; I at a residue corresponding to residue 220 in SEQ ID NO: 2; M at a residue corresponding to residue 296 in SEQ ID NO: 2; M at a residue corresponding to residue 311 in SEQ ID NO: 2; M at a residue corresponding to residue 187 in SEQ ID NO: 2; L at a residue corresponding to residue 190 in SEQ ID NO: 2; D at a residue corresponding to residue 182 in SEQ ID NO: 2; H at a residue corresponding to residue 272 in SEQ ID NO: 2; P at a residue corresponding to residue 70 in SEQ ID NO: 1; I at a residue corresponding to residue 144 in SEQ ID NO: 3; E at a residue corresponding to residue 322 in SEQ ID NO: 2; I at a residue corresponding to residue 247 in SEQ ID NO: 2; V at a residue corresponding to residue 258 in SEQ ID NO: 6; D at a residue corresponding to residue 35 in SEQ ID NO: 2; K at a residue corresponding to residue 279 in SEQ ID NO: 2; L at a residue corresponding to residue 176 in SEQ ID NO: 3; D at a residue corresponding to residue 15 in SEQ ID NO: 2; Q at a residue corresponding to residue 15 in SEQ ID NO: 2; M at a residue corresponding to residue 238 in SEQ ID NO: 2; A at a residue corresponding to residue 25 in SEQ ID NO: 3; W at a residue corresponding to residue 156 in SEQ ID NO: 2; A at a residue corresponding to residue 316 in SEQ ID NO: 2; H at a residue corresponding to residue 202 in SEQ ID NO: 2; L at a residue corresponding to residue 247 in SEQ ID NO: 2; W at a residue corresponding to residue 226 in SEQ ID NO: 2; P at a residue corresponding to residue 39 in SEQ ID NO: 2; A at a residue corresponding to residue 60 in SEQ ID NO: 2; D at a residue corresponding to residue 219 in SEQ ID NO: 2; D at a residue corresponding to residue 245 in SEQ ID NO: 2; H at a residue corresponding to residue 258 in SEQ ID NO: 2; S at a residue corresponding to residue 14 in SEQ ID NO: 2; V at a residue corresponding to residue 32 in SEQ ID NO: 2; K at a residue corresponding to residue 275 in SEQ ID NO: 2; S at a residue corresponding to residue 30 in SEQ ID NO: 2; E at a residue corresponding to residue 44 in SEQ ID NO: 2; N at a residue corresponding to residue 76 in SEQ ID NO: 2; L at a residue corresponding to residue 8 in SEQ ID NO: 2; W at a residue corresponding to residue 267 in SEQ ID NO: 4; K at a residue corresponding to residue 202 in SEQ ID NO: 2; H at a residue corresponding to residue 176 in SEQ ID NO: 3; L at a residue corresponding to residue 265 in SEQ ID NO: 4; K at a residue corresponding to residue 309 in SEQ ID NO: 2; L at a residue corresponding to residue 294 in SEQ ID NO: 2; W at a residue corresponding to residue 26 in SEQ ID NO: 4; E at a residue corresponding to residue 14 in SEQ ID NO: 2; G at a residue corresponding to residue 271 in SEQ ID NO: 2; R at a residue corresponding to residue 86 in SEQ ID NO: 2; D at a residue corresponding to residue 305 in SEQ ID NO: 2; A at a residue corresponding to residue 267 in SEQ ID NO: 4; D at a residue corresponding to residue 43 in SEQ ID NO: 2; K at a residue corresponding to residue 316 in SEQ ID NO: 2; Y at a residue corresponding to residue 103 in SEQ ID NO: 2; F at a residue corresponding to residue 290 in SEQ ID NO: 2; C at a residue corresponding to residue 93 in SEQ ID NO: 2; I at a residue corresponding to residue 147 in SEQ ID NO: 4; G at a residue corresponding to residue 266 in SEQ ID NO: 4; C at a residue corresponding to residue 225 in SEQ ID NO: 2; P at a residue corresponding to residue 324 in SEQ ID NO: 2; E at a residue corresponding to residue 85 in SEQ ID NO: 2; P at a residue corresponding to residue 181 in SEQ ID NO: 1; N at a residue corresponding to residue 201 in SEQ ID NO: 2; M at a residue corresponding to residue 221 in SEQ ID NO: 2; T at a residue corresponding to residue 164 in SEQ ID NO: 4; M at a residue corresponding to residue 263 in SEQ ID NO: 1; P at a residue corresponding to residue 200 in SEQ ID NO: 2; K at a residue corresponding to residue 3 in SEQ ID NO: 2; W at a residue corresponding to residue 30 in SEQ ID NO: 2; L at a residue corresponding to residue 80 in SEQ ID NO: 2; Q at a residue corresponding to residue 121 in SEQ ID NO: 2; M at a residue corresponding to residue 80 in SEQ ID NO: 2; S at a residue corresponding to residue 181 in SEQ ID NO: 3; R at a residue corresponding to residue 308 in SEQ ID NO: 2; F at a residue corresponding to residue 27 in SEQ ID NO: 1; D at a residue corresponding to residue 56 in SEQ ID NO: 2; I at a residue corresponding to residue 51 in SEQ ID NO: 2; S at a residue corresponding to residue 263 in SEQ ID NO: 1; S at a residue corresponding to residue 69 in SEQ ID NO: 3; C at a residue corresponding to residue 70 in SEQ ID NO: 1; S at a residue corresponding to residue 64 in SEQ ID NO: 2; Y at a residue corresponding to residue 255 in SEQ ID NO: 2; F at a residue corresponding to residue 36 in SEQ ID NO: 2; D at a residue corresponding to residue 132 in SEQ ID NO: 2; A at a residue corresponding to residue 300 in SEQ ID NO: 2; M at a residue corresponding to residue 25 in SEQ ID NO: 1; G at a residue corresponding to residue 262 in SEQ ID NO: 3; L at a residue corresponding to residue 193 in SEQ ID NO: 2; M at a residue corresponding to residue 220 in SEQ ID NO: 2; K at a residue corresponding to residue 2 in SEQ ID NO: 2; I at a residue corresponding to residue 4 in SEQ ID NO: 2; V at a residue corresponding to residue 89 in SEQ ID NO: 2; A at a residue corresponding to residue 267 in SEQ ID NO: 1; R at a residue corresponding to residue 81 in SEQ ID NO: 2; D at a residue corresponding to residue 115 in SEQ ID NO: 2; K at a residue corresponding to residue 82 in SEQ ID NO: 2; V at a residue corresponding to residue 80 in SEQ ID NO: 2; Y at a residue corresponding to residue 150 in SEQ ID NO: 2; C at a residue corresponding to residue 203 in SEQ ID NO: 2; Q at a residue corresponding to residue 59 in SEQ ID NO: 2; F at a residue corresponding to residue 325 in SEQ ID NO: 2; G at a residue corresponding to residue 274 in SEQ ID NO: 2; G at a residue corresponding to residue 282 in SEQ ID NO: 2; D at a residue corresponding to residue 291 in SEQ ID NO: 2; K at a residue corresponding to residue 299 in SEQ ID NO: 2; P at a residue corresponding to residue 13 in SEQ ID NO: 2; E at a residue corresponding to residue 135 in SEQ ID NO: 2; F at a residue corresponding to residue 187 in SEQ ID NO: 2; R at a residue corresponding to residue 299 in SEQ ID NO: 2; M at a residue corresponding to residue 18 in SEQ ID NO: 2; V at a residue corresponding to residue 134 in SEQ ID NO: 2; N at a residue corresponding to residue 42 in SEQ ID NO: 2; S at a residue corresponding to residue 263 in SEQ ID NO: 4; M at a residue corresponding to residue 27 in SEQ ID NO: 1; D at a residue corresponding to residue 14 in SEQ ID NO: 2; E at a residue corresponding to residue 124 in SEQ ID NO: 2; P at a residue corresponding to residue 10 in SEQ ID NO: 2; I at a residue corresponding to residue 307 in SEQ ID NO: 2; K at a residue corresponding to residue 317 in SEQ ID NO: 2; Y at a residue corresponding to residue 107 in SEQ ID NO: 2; S at a residue corresponding to residue 150 in SEQ ID NO: 2; T at a residue corresponding to residue 208 in SEQ ID NO: 1; R at a residue corresponding to residue 56 in SEQ ID NO: 2; I at a residue corresponding to residue 148 in SEQ ID NO: 3; T at a residue corresponding to residue 267 in SEQ ID NO: 4; M at a residue corresponding to residue 32 in SEQ ID NO: 2; L at a residue corresponding to residue 289 in SEQ ID NO: 2; I at a residue corresponding to residue 164 in SEQ ID NO: 1; T at a residue corresponding to residue 8 in SEQ ID NO: 2; H at a residue corresponding to residue 60 in SEQ ID NO: 2; D at a residue corresponding to residue 306 in SEQ ID NO: 2; E at a residue corresponding to residue 313 in SEQ ID NO: 2; Q at a residue corresponding to residue 316 in SEQ ID NO: 2; R at a residue corresponding to residue 52 in SEQ ID NO: 2; V at a residue corresponding to residue 4 in SEQ ID NO: 2; S at a residue corresponding to residue 320 in SEQ ID NO: 2; S at a residue corresponding to residue 324 in SEQ ID NO: 2; G at a residue corresponding to residue 136 in SEQ ID NO: 2; D at a residue corresponding to residue 195 in SEQ ID NO: 2; Q at a residue corresponding to residue 34 in SEQ ID NO: 2; S at a residue corresponding to residue 228 in SEQ ID NO: 3; V at a residue corresponding to residue 148 in SEQ ID NO: 1; Q at a residue corresponding to residue 326 in SEQ ID NO: 2; E at a residue corresponding to residue 48 in SEQ ID NO: 2; F at a residue corresponding to residue 311 in SEQ ID NO: 2; L at a residue corresponding to residue 25 in SEQ ID NO: 4; M at a residue corresponding to residue 214 in SEQ ID NO: 2; M at a residue corresponding to residue 286 in SEQ ID NO: 1; E at a residue corresponding to residue 306 in SEQ ID NO: 2; D at a residue corresponding to residue 178 in SEQ ID NO: 4; N at a residue corresponding to residue 253 in SEQ ID NO: 2; I at a residue corresponding to residue 312 in SEQ ID NO: 2; T at a residue corresponding to residue 2 in SEQ ID NO: 2; T at a residue corresponding to residue 3 in SEQ ID NO: 2; E at a residue corresponding to residue 132 in SEQ ID NO: 2; D at a residue corresponding to residue 38 in SEQ ID NO: 2; I at a residue corresponding to residue 92 in SEQ ID NO: 2; T at a residue corresponding to residue 25 in SEQ ID NO: 3; R at a residue corresponding to residue 279 in SEQ ID NO: 2; M at a residue corresponding to residue 20 in SEQ ID NO: 4; Q at a residue corresponding to residue 53 in SEQ ID NO: 2; V at a residue corresponding to residue 220 in SEQ ID NO: 2; D at a residue corresponding to residue 240 in SEQ ID NO: 2; E at a residue corresponding to residue 308 in SEQ ID NO: 2; G at a residue corresponding to residue 88 in SEQ ID NO: 2; W at a residue corresponding to residue 107 in SEQ ID NO: 2; Q at a residue corresponding to residue 3 in SEQ ID NO: 2; S at a residue corresponding to residue 87 in SEQ ID NO: 2; I at a residue corresponding to residue 153 in SEQ ID NO: 2; Q at a residue corresponding to residue 56 in SEQ ID NO: 2; F at a residue corresponding to residue 106 in SEQ ID NO: 2; T at a residue corresponding to residue 118 in SEQ ID NO: 2; Q at a residue corresponding to residue 168 in SEQ ID NO: 2; W at a residue corresponding to residue 49 in SEQ ID NO: 2; E at a residue corresponding to residue 304 in SEQ ID NO: 2; R at a residue corresponding to residue 326 in SEQ ID NO: 2; E at a residue corresponding to residue 249 in SEQ ID NO: 2; V at a residue corresponding to residue 176 in SEQ ID NO: 3; C at a residue corresponding to residue 244 in SEQ ID NO: 2; H at a residue corresponding to residue 106 in SEQ ID NO: 2; V at a residue corresponding to residue 227 in SEQ ID NO: 2; E at a residue corresponding to residue 242 in SEQ ID NO: 2; E at a residue corresponding to residue 245 in SEQ ID NO: 2; L at a residue corresponding to residue 122 in SEQ ID NO: 2; W at a residue corresponding to residue 36 in SEQ ID NO: 2; I at a residue corresponding to residue 293 in SEQ ID NO: 2; M at a residue corresponding to residue 126 in SEQ ID NO: 4; T at a residue corresponding to residue 183 in SEQ ID NO: 2; K at a residue corresponding to residue 322 in SEQ ID NO: 2; V at a residue corresponding to residue 146 in SEQ ID NO: 3; H at a residue corresponding to residue 150 in SEQ ID NO: 2; E at a residue corresponding to residue 12 in SEQ ID NO: 2; I at a residue corresponding to residue 47 in SEQ ID NO: 2; L at a residue corresponding to residue 51 in SEQ ID NO: 2; W at a residue corresponding to residue 249 in SEQ ID NO: 2; T at a residue corresponding to residue 267 in SEQ ID NO: 1; A at a residue corresponding to residue 2 in SEQ ID NO: 2; R at a residue corresponding to residue 258 in SEQ ID NO: 2; V at a residue corresponding to residue 307 in SEQ ID NO: 2; C at a residue corresponding to residue 176 in SEQ ID NO: 3; I at a residue corresponding to residue 144 in SEQ ID NO: 1; I at a residue corresponding to residue 251 in SEQ ID NO: 2; R at a residue corresponding to residue 5 in SEQ ID NO: 2; H at a residue corresponding to residue 279 in SEQ ID NO: 2; M at a residue corresponding to residue 298 in SEQ ID NO: 2; V at a residue corresponding to residue 77 in SEQ ID NO: 2; D at a residue corresponding to residue 120 in SEQ ID NO: 2; R at a residue corresponding to residue 223 in SEQ ID NO: 2; S at a residue corresponding to residue 266 in SEQ ID NO: 4; R at a residue corresponding to residue 166 in SEQ ID NO: 2; S at a residue corresponding to residue 181 in SEQ ID NO: 1; E at a residue corresponding to residue 82 in SEQ ID NO: 2; L at a residue corresponding to residue 83 in SEQ ID NO: 2; A at a residue corresponding to residue 123 in SEQ ID NO: 2; H at a residue corresponding to residue 128 in SEQ ID NO: 2; H at a residue corresponding to residue 236 in SEQ ID NO: 2; M at a residue corresponding to residue 25 in SEQ ID NO: 4; D at a residue corresponding to residue 76 in SEQ ID NO: 2; V at a residue corresponding to residue 91 in SEQ ID NO: 2; K at a residue corresponding to residue 326 in SEQ ID NO: 2; A at a residue corresponding to residue 208 in SEQ ID NO: 3; C at a residue corresponding to residue 265 in SEQ ID NO: 1; T at a residue corresponding to residue 291 in SEQ ID NO: 2; T at a residue corresponding to residue 267 in SEQ ID NO: 3; N at a residue corresponding to residue 128 in SEQ ID NO: 2; N at a residue corresponding to residue 209 in SEQ ID NO: 4; R at a residue corresponding to residue 249 in SEQ ID NO: 2; T at a residue corresponding to residue 70 in SEQ ID NO: 1; E at a residue corresponding to residue 215 in SEQ ID NO: 2; C at a residue corresponding to residue 235 in SEQ ID NO: 2; I at a residue corresponding to residue 203 in SEQ ID NO: 2; C at a residue corresponding to residue 263 in SEQ ID NO: 4; S at a residue corresponding to residue 239 in SEQ ID NO: 2; Y at a residue corresponding to residue 240 in SEQ ID NO: 2; G at a residue corresponding to residue 147 in SEQ ID NO: 4; C at a residue corresponding to residue 8 in SEQ ID NO: 2; D at a residue corresponding to residue 215 in SEQ ID NO: 2; W at a residue corresponding to residue 48 in SEQ ID NO: 2; C at a residue corresponding to residue 165 in SEQ ID NO: 2; W at a residue corresponding to residue 274 in SEQ ID NO: 2; W at a residue corresponding to residue 277 in SEQ ID NO: 2; C at a residue corresponding to residue 263 in SEQ ID NO: 1; I at a residue corresponding to residue 176 in SEQ ID NO: 3; T at a residue corresponding to residue 208 in SEQ ID NO: 3; T at a residue corresponding to residue 263 in SEQ ID NO: 1; F at a residue corresponding to residue 286 in SEQ ID NO: 4; N at a residue corresponding to residue 68 in SEQ ID NO: 3; A at a residue corresponding to residue 305 in SEQ ID NO: 2; E at a residue corresponding to residue 100 in SEQ ID NO: 3; C at a residue corresponding to residue 179 in SEQ ID NO: 1; M at a residue corresponding to residue 246 in SEQ ID NO: 2; P at a residue corresponding to residue 12 in SEQ ID NO: 2; H at a residue corresponding to residue 222 in SEQ ID NO: 2; S at a residue corresponding to residue 147 in SEQ ID NO: 4; S at a residue corresponding to residue 265 in SEQ ID NO: 3; W at a residue corresponding to residue 109 in SEQ ID NO: 2; H at a residue corresponding to residue 140 in SEQ ID NO: 2; M at a residue corresponding to residue 318 in SEQ ID NO: 2; S at a residue corresponding to residue 181 in SEQ ID NO: 4; Q at a residue corresponding to residue 265 in SEQ ID NO: 4; E at a residue corresponding to residue 155 in SEQ ID NO: 2; W at a residue corresponding to residue 236 in SEQ ID NO: 2; T at a residue corresponding to residue 263 in SEQ ID NO: 4; Q at a residue corresponding to residue 5 in SEQ ID NO: 2; N at a residue corresponding to residue 44 in SEQ ID NO: 2; D at a residue corresponding to residue 241 in SEQ ID NO: 2; M at a residue corresponding to residue 110 in SEQ ID NO: 2; W at a residue corresponding to residue 255 in SEQ ID NO: 2; V at a residue corresponding to residue 289 in SEQ ID NO: 2; F at a residue corresponding to residue 318 in SEQ ID NO: 2; R at a residue corresponding to residue 140 in SEQ ID NO: 2; T at a residue corresponding to residue 287 in SEQ ID NO: 2; S at a residue corresponding to residue 168 in SEQ ID NO: 4; K at a residue corresponding to residue 55 in SEQ ID NO: 2; D at a residue corresponding to residue 178 in SEQ ID NO: 3; M at a residue corresponding to residue 27 in SEQ ID NO: 4; C at a residue corresponding to residue 173 in SEQ ID NO: 4; S at a residue corresponding to residue 84 in SEQ ID NO: 2; T at a residue corresponding to residue 265 in SEQ ID NO: 1; S at a residue corresponding to residue 303 in SEQ ID NO: 2; T at a residue corresponding to residue 176 in SEQ ID NO: 4; C at a residue corresponding to residue 221 in SEQ ID NO: 2; C at a residue corresponding to residue 177 in SEQ ID NO: 3; T at a residue corresponding to residue 265 in SEQ ID NO: 4; A at a residue corresponding to residue 208 in SEQ ID NO: 1; I at a residue corresponding to residue 227 in SEQ ID NO: 2; N at a residue corresponding to residue 209 in SEQ ID NO: 3; G at a residue corresponding to residue 147 in SEQ ID NO: 1; T at a residue corresponding to residue 176 in SEQ ID NO: 1; C at a residue corresponding to residue 208 in SEQ ID NO: 4; I at a residue corresponding to residue 260 in SEQ ID NO: 4; W at a residue corresponding to residue 110 in SEQ ID NO: 2; G at a residue corresponding to residue 135 in SEQ ID NO: 2; A at a residue corresponding to residue 221 in SEQ ID NO: 2; R at a residue corresponding to residue 278 in SEQ ID NO: 2; C at a residue corresponding to residue 179 in SEQ ID NO: 3; M at a residue corresponding to residue 176 in SEQ ID NO: 1; S at a residue corresponding to residue 179 in SEQ ID NO: 1; W at a residue corresponding to residue 286 in SEQ ID NO: 1; W at a residue corresponding to residue 188 in SEQ ID NO: 2; F at a residue corresponding to residue 147 in SEQ ID NO: 1; V at a residue corresponding to residue 176 in SEQ ID NO: 1; T at a residue corresponding to residue 208 in SEQ ID NO: 4; S at a residue corresponding to residue 265 in SEQ ID NO: 4; C at a residue corresponding to residue 181 in SEQ ID NO: 1; F at a residue corresponding to residue 109 in SEQ ID NO: 2; M at a residue corresponding to residue 189 in SEQ ID NO: 3; W at a residue corresponding to residue 33 in SEQ ID NO: 2; N at a residue corresponding to residue 68 in SEQ ID NO: 1; C at a residue corresponding to residue 147 in SEQ ID NO: 3; C at a residue corresponding to residue 148 in SEQ ID NO: 1; R at a residue corresponding to residue 298 in SEQ ID NO: 2; H at a residue corresponding to residue 158 in SEQ ID NO: 2; M at a residue corresponding to residue 148 in SEQ ID NO: 4; S at a residue corresponding to residue 266 in SEQ ID NO: 1; H at a residue corresponding to residue 249 in SEQ ID NO: 2; C at a residue corresponding to residue 177 in SEQ ID NO: 1; M at a residue corresponding to residue 286 in SEQ ID NO: 4; D at a residue corresponding to residue 72 in SEQ ID NO: 2; I at a residue corresponding to residue 66 in SEQ ID NO: 4; I at a residue corresponding to residue 164 in SEQ ID NO: 4; M at a residue corresponding to residue 148 in SEQ ID NO: 1; C at a residue corresponding to residue 176 in SEQ ID NO: 1; F at a residue corresponding to residue 27 in SEQ ID NO: 4; P at a residue corresponding to residue 68 in SEQ ID NO: 3; Y at a residue corresponding to residue 176 in SEQ ID NO: 3; S at a residue corresponding to residue 206 in SEQ ID NO: 4; I at a residue corresponding to residue 66 in SEQ ID NO: 1; T at a residue corresponding to residue 27 in SEQ ID NO: 3; V at a residue corresponding to residue 189 in SEQ ID NO: 3; C at a residue corresponding to residue 148 in SEQ ID NO: 4; I at a residue corresponding to residue 148 in SEQ ID NO: 4; S at a residue corresponding to residue 69 in SEQ ID NO: 1; Y at a residue corresponding to residue 176 in SEQ ID NO: 1; Q at a residue corresponding to residue 68 in SEQ ID NO: 3; F at a residue corresponding to residue 176 in SEQ ID NO: 3; E at a residue corresponding to residue 284 in SEQ ID NO: 3; H at a residue corresponding to residue 100 in SEQ ID NO: 3; G at a residue corresponding to residue 267 in SEQ ID NO: 4; N at a residue corresponding to residue 68 in SEQ ID NO: 4; M at a residue corresponding to residue 68 in SEQ ID NO: 4; M at a residue corresponding to residue 68 in SEQ ID NO: 1; W at a residue corresponding to residue 286 in SEQ ID NO: 4; C at a residue corresponding to residue 68 in SEQ ID NO: 4; W at a residue corresponding to residue 105 in SEQ ID NO: 2; H at a residue corresponding to residue 26 in SEQ ID NO: 4; I at a residue corresponding to residue 144 in SEQ ID NO: 4; V at a residue corresponding to residue 146 in SEQ ID NO: 4; M at a residue corresponding to residue 176 in SEQ ID NO: 4; M at a residue corresponding to residue 189 in SEQ ID NO: 4; N at a residue corresponding to residue 263 in SEQ ID NO: 1; C at a residue corresponding to residue 208 in SEQ ID NO: 3; V at a residue corresponding to residue 27 in SEQ ID NO: 4; I at a residue corresponding to residue 176 in SEQ ID NO: 1; G at a residue corresponding to residue 262 in SEQ ID NO: 4; A at a residue corresponding to residue 189 in SEQ ID NO: 3; H at a residue corresponding to residue 176 in SEQ ID NO: 4; A at a residue corresponding to residue 148 in SEQ ID NO: 3; I at a residue corresponding to residue 189 in SEQ ID NO: 3; C at a residue corresponding to residue 68 in SEQ ID NO: 1; S at a residue corresponding to residue 206 in SEQ ID NO: 3; T at a residue corresponding to residue 27 in SEQ ID NO: 4; T at a residue corresponding to residue 27 in SEQ ID NO: 1; N at a residue corresponding to residue 263 in SEQ ID NO: 4; C at a residue corresponding to residue 189 in SEQ ID NO: 3; V at a residue corresponding to residue 204 in SEQ ID NO: 4; I at a residue corresponding to residue 146 in SEQ ID NO: 3; S at a residue corresponding to residue 228 in SEQ ID NO: 1; F at a residue corresponding to residue 57 in SEQ ID NO: 2; W at a residue corresponding to residue 98 in SEQ ID NO: 4; I at a residue corresponding to residue 25 in SEQ ID NO: 3; M at a residue corresponding to residue 68 in SEQ ID NO: 3; V at a residue corresponding to residue 189 in SEQ ID NO: 4; G at a residue corresponding to residue 181 in SEQ ID NO: 4; C at a residue corresponding to residue 189 in SEQ ID NO: 4; D at a residue corresponding to residue 100 in SEQ ID NO: 3; L at a residue corresponding to residue 266 in SEQ ID NO: 3; I at a residue corresponding to residue 266 in SEQ ID NO: 3; Q at a residue corresponding to residue 100 in SEQ ID NO: 3; M at a residue corresponding to residue 266 in SEQ ID NO: 1; K at a residue corresponding to residue 236 in SEQ ID NO: 2; W at a residue corresponding to residue 151 in SEQ ID NO: 2; G at a residue corresponding to residue 266 in SEQ ID NO: 3; P at a residue corresponding to residue 70 in SEQ ID NO: 3; T at a residue corresponding to residue 266 in SEQ ID NO: 3; H at a residue corresponding to residue 103 in SEQ ID NO: 2; W at a residue corresponding to residue 272 in SEQ ID NO: 2; A at a residue corresponding to residue 266 in SEQ ID NO: 3; T at a residue corresponding to residue 266 in SEQ ID NO: 1; C at a residue corresponding to residue 266 in SEQ ID NO: 3; G at a residue corresponding to residue 266 in SEQ ID NO: 1; T at a residue corresponding to residue 266 in SEQ ID NO: 4; M at a residue corresponding to residue 263 in SEQ ID NO: 3; M at a residue corresponding to residue 27 in SEQ ID NO: 3; S at a residue corresponding to residue 29 in SEQ ID NO: 2; H at a residue corresponding to residue 151 in SEQ ID NO: 2; Y at a residue corresponding to residue 281 in SEQ ID NO: 2; M at a residue corresponding to residue 272 in SEQ ID NO: 2; C at a residue corresponding to residue 99 in SEQ ID NO: 2; H at a residue corresponding to residue 36 in SEQ ID NO: 2; F at a residue corresponding to residue 281 in SEQ ID NO: 2; I at a residue corresponding to residue 259 in SEQ ID NO: 2; W at a residue corresponding to residue 32 in SEQ ID NO: 2; V at a residue corresponding to residue 148 in SEQ ID NO: 4; D at a residue corresponding to residue 283 in SEQ ID NO: 2; H at a residue corresponding to residue 238 in SEQ ID NO: 2; F at a residue corresponding to residue 288 in SEQ ID NO: 2; C at a residue corresponding to residue 49 in SEQ ID NO: 2; N at a residue corresponding to residue 151 in SEQ ID NO: 2; W at a residue corresponding to residue 267 in SEQ ID NO: 3; Q at a residue corresponding to residue 266 in SEQ ID NO: 3; I at a residue corresponding to residue 83 in SEQ ID NO: 2; E at a residue corresponding to residue 291 in SEQ ID NO: 2; E at a residue corresponding to residue 121 in SEQ ID NO: 2; G at a residue corresponding to residue 31 in SEQ ID NO: 2; M at a residue corresponding to residue 147 in SEQ ID NO: 4; L at a residue corresponding to residue 290 in SEQ ID NO: 2; D at a residue corresponding to residue 151 in SEQ ID NO: 2; P at a residue corresponding to residue 30 in SEQ ID NO: 2; R at a residue corresponding to residue 191 in SEQ ID NO: 2; M at a residue corresponding to residue 89 in SEQ ID NO: 2; Y at a residue corresponding to residue 288 in SEQ ID NO: 2; L at a residue corresponding to residue 250 in SEQ ID NO: 2; I at a residue corresponding to residue 260 in SEQ ID NO: 3; F at a residue corresponding to residue 32 in SEQ ID NO: 2; I at a residue corresponding to residue 122 in SEQ ID NO: 2; Q at a residue corresponding to residue 320 in SEQ ID NO: 2; D at a residue corresponding to residue 28 in SEQ ID NO: 2; V at a residue corresponding to residue 251 in SEQ ID NO: 2; N at a residue corresponding to residue 63 in SEQ ID NO: 2; E at a residue corresponding to residue 15 in SEQ ID NO: 2; R at a residue corresponding to residue 245 in SEQ ID NO: 2; N at a residue corresponding to residue 308 in SEQ ID NO: 2; G at a residue corresponding to residue 263 in SEQ ID NO: 3; A at a residue corresponding to residue 13 in SEQ ID NO: 2; D at a residue corresponding to residue 303 in SEQ ID NO: 2; V at a residue corresponding to residue 294 in SEQ ID NO: 2; F at a residue corresponding to residue 40 in SEQ ID NO: 2; D at a residue corresponding to residue 194 in SEQ ID NO: 2; I at a residue corresponding to residue 18 in SEQ ID NO: 2; M at a residue corresponding to residue 47 in SEQ ID NO: 2; D at a residue corresponding to residue 78 in SEQ ID NO: 2; D at a residue corresponding to residue 320 in SEQ ID NO: 2; T at a residue corresponding to residue 263 in SEQ ID NO: 3; Q at a residue corresponding to residue 263 in SEQ ID NO: 3; T at a residue corresponding to residue 311 in SEQ ID NO: 2; H at a residue corresponding to residue 325 in SEQ ID NO: 2; W at a residue corresponding to residue 106 in SEQ ID NO: 2; R at a residue corresponding to residue 309 in SEQ ID NO: 2; M at a residue corresponding to residue 5 in SEQ ID NO: 2; M at a residue corresponding to residue 107 in SEQ ID NO: 2; M at a residue corresponding to residue 49 in SEQ ID NO: 2; S at a residue corresponding to residue 118 in SEQ ID NO: 2; E at a residue corresponding to residue 53 in SEQ ID NO: 2; L at a residue corresponding to residue 318 in SEQ ID NO: 2; H at a residue corresponding to residue 90 in SEQ ID NO: 2; D at a residue corresponding to residue 155 in SEQ ID NO: 2; I at a residue corresponding to residue 127 in SEQ ID NO: 2; L at a residue corresponding to residue 246 in SEQ ID NO: 2; Q at a residue corresponding to residue 304 in SEQ ID NO: 2; M at a residue corresponding to residue 16 in SEQ ID NO: 2; R at a residue corresponding to residue 292 in SEQ ID NO: 2; E at a residue corresponding to residue 78 in SEQ ID NO: 2; V at a residue corresponding to residue 148 in SEQ ID NO: 3; R at a residue corresponding to residue 85 in SEQ ID NO: 2; N at a residue corresponding to residue 317 in SEQ ID NO: 2; H at a residue corresponding to residue 284 in SEQ ID NO: 1; F at a residue corresponding to residue 265 in SEQ ID NO: 1; M at a residue corresponding to residue 265 in SEQ ID NO: 3; H at a residue corresponding to residue 284 in SEQ ID NO: 4; Y at a residue corresponding to residue 265 in SEQ ID NO: 4; W at a residue corresponding to residue 265 in SEQ ID NO: 3; Y at a residue corresponding to residue 284 in SEQ ID NO: 4; C at a residue corresponding to residue 284 in SEQ ID NO: 1; N at a residue corresponding to residue 284 in SEQ ID NO: 1; Y at a residue corresponding to residue 284 in SEQ ID NO: 1; W at a residue corresponding to residue 265 in SEQ ID NO: 1; A at a residue corresponding to residue 266 in SEQ ID NO: 1; M at a residue corresponding to residue 284 in SEQ ID NO: 4; W at a residue corresponding to residue 265 in SEQ ID NO: 4; M at a residue corresponding to residue 265 in SEQ ID NO: 1; F at a residue corresponding to residue 284 in SEQ ID NO: 4; G at a residue corresponding to residue 285 in SEQ ID NO: 2; A at a residue corresponding to residue 266 in SEQ ID NO: 4; C at a residue corresponding to residue 70 in SEQ ID NO: 3; W at a residue corresponding to residue 267 in SEQ ID NO: 1; L at a residue corresponding to residue 27 in SEQ ID NO: 3; G at a residue corresponding to residue 283 in SEQ ID NO: 2; N at a residue corresponding to residue 284 in SEQ ID NO: 4; and/or T at a residue corresponding to residue 284 in SEQ ID NO: 3.

[0125] In some embodiments, a PTE or PTER has hydrolase activity on VX. In some embodiments, the PTE or PTER comprises: W at a residue corresponding to residue 266 in SEQ ID NO: 3; Y at a residue corresponding to residue 238 in SEQ ID NO: 2; W at a residue corresponding to residue 266 in SEQ ID NO: 1; N at a residue corresponding to residue 209 in SEQ ID NO: 1; P at a residue corresponding to residue 77 in SEQ ID NO: 2; H at a residue corresponding to residue 38 in SEQ ID NO: 2; C at a residue corresponding to residue 188 in SEQ ID NO: 2; C at a residue corresponding to residue 27 in SEQ ID NO: 4; C at a residue corresponding to residue 27 in SEQ ID NO: 1; C at a residue corresponding to residue 126 in SEQ ID NO: 4; Y at a residue corresponding to residue 27 in SEQ ID NO: 3; V at a residue corresponding to residue 73 in SEQ ID NO: 3; C at a residue corresponding to residue 27 in SEQ ID NO: 3; Y at a residue corresponding to residue 176 in SEQ ID NO: 4; F at a residue corresponding to residue 176 in SEQ ID NO: 1; E at a residue corresponding to residue 179 in SEQ ID NO: 1; W at a residue corresponding to residue 153 in SEQ ID NO: 2; W at a residue corresponding to residue 276 in SEQ ID NO: 2; C at a residue corresponding to residue 25 in SEQ ID NO: 3; W at a residue corresponding to residue 27 in SEQ ID NO: 3; V at a residue corresponding to residue 27 in SEQ ID NO: 3; L at a residue corresponding to residue 189 in SEQ ID NO: 4; C at a residue corresponding to residue 231 in SEQ ID NO: 6; S at a residue corresponding to residue 69 in SEQ ID NO: 4; R at a residue corresponding to residue 296 in SEQ ID NO: 2; H at a residue corresponding to residue 266 in SEQ ID NO: 3; C at a residue corresponding to residue 177 in SEQ ID NO: 4; Q at a residue corresponding to residue 27 in SEQ ID NO: 1; I at a residue corresponding to residue 176 in SEQ ID NO: 4; I at a residue corresponding to residue 189 in SEQ ID NO: 4; A at a residue corresponding to residue 189 in SEQ ID NO: 4; A at a residue corresponding to residue 208 in SEQ ID NO: 4; F at a residue corresponding to residue 176 in SEQ ID NO: 4; A at a residue corresponding to residue 68 in SEQ ID NO: 3; Y at a residue corresponding to residue 27 in SEQ ID NO: 1; A at a residue corresponding to residue 68 in SEQ ID NO: 1; Y at a residue corresponding to residue 178 in SEQ ID NO: 4; H at a residue corresponding to residue 128 in SEQ ID NO: 6; and/or L at a residue corresponding to residue 177 in SEQ ID NO: 1.

[0126] In some embodiments, a PTE or PTER has hydrolase activity on VR. In some embodiments, the PTE or PTER comprises: M at a residue corresponding to residue 265 in SEQ ID NO: 4; Q at a residue corresponding to residue 284 in SEQ ID NO: 1; C at a residue corresponding to residue 284 in SEQ ID NO: 4; Q at a residue corresponding to residue 284 in SEQ ID NO: 4; L at a residue corresponding to residue 265 in SEQ ID NO: 1; K at a residue corresponding to residue 284 in SEQ ID NO: 1; K at a residue corresponding to residue 284 in SEQ ID NO: 3; C at a residue corresponding to residue 265 in SEQ ID NO: 4; N at a residue corresponding to residue 206 in SEQ ID NO: 3; F at a residue corresponding to residue 263 in SEQ ID NO: 3; I at a residue corresponding to residue 25 in SEQ ID NO: 1; S at a residue corresponding to residue 228 in SEQ ID NO: 4; N at a residue corresponding to residue 229 in SEQ ID NO: 6; R at a residue corresponding to residue 284 in SEQ ID NO: 4; W at a residue corresponding to residue 27 in SEQ ID NO: 1; Q at a residue corresponding to residue 303 in SEQ ID NO: 6; I at a residue corresponding to residue 265 in SEQ ID NO: 4; C at a residue corresponding to residue 208 in SEQ ID NO: 1; A at a residue corresponding to residue 228 in SEQ ID NO: 1; L at a residue corresponding to residue 189 in SEQ ID NO: 3; R at a residue corresponding to residue 284 in SEQ ID NO: 3; I at a residue corresponding to residue 284 in SEQ ID NO: 1; R at a residue corresponding to residue 284 in SEQ ID NO: 1; C at a residue corresponding to residue 210 in SEQ ID NO: 4; V at a residue corresponding to residue 265 in SEQ ID NO: 4; M at a residue corresponding to residue 204 in SEQ ID NO: 6; R at a residue corresponding to residue 145 in SEQ ID NO: 1; H at a residue corresponding to residue 176 in SEQ ID NO: 1; F at a residue corresponding to residue 263 in SEQ ID NO: 1; D at a residue corresponding to residue 23 in SEQ ID NO: 4; F at a residue corresponding to residue 98 in SEQ ID NO: 3; M at a residue corresponding to residue 26 in SEQ ID NO: 4; and/or V at a residue corresponding to residue 178 in SEQ ID NO: 4.

[0127] In some embodiments, a PTE or PTER has hydrolase activity on GB and GD. In some embodiments, the PTE or PTER comprises: Y at a residue corresponding to residue 265 in SEQ ID NO: 1; M at a residue corresponding to residue 266 in SEQ ID NO: 1; G at a residue corresponding to residue 266 in SEQ ID NO: 1; W at a residue corresponding to residue 267 in SEQ ID NO: 1; H at a residue corresponding to residue 284 in SEQ ID NO: 1; S at a residue corresponding to residue 29 in SEQ ID NO: 2; C at a residue corresponding to residue 99 in SEQ ID NO: 2; H at a residue corresponding to residue 103 in SEQ ID NO: 2; W at a residue corresponding to residue 151 in SEQ ID NO: 2; K at a residue corresponding to residue 236 in SEQ ID NO: 2; C at a residue corresponding to residue 272 in SEQ ID NO: 2; W at a residue corresponding to residue 272 in SEQ ID NO: 2; Y at a residue corresponding to residue 281 in SEQ ID NO: 2; G at a residue corresponding to residue 285 in SEQ ID NO: 2; D at a residue corresponding to residue 100 in SEQ ID NO: 3; Y at a residue corresponding to residue 265 in SEQ ID NO: 3; I at a residue corresponding to residue 266 in SEQ ID NO: 3; L at a residue corresponding to residue 266 in SEQ ID NO: 3; H at a residue corresponding to residue 284 in SEQ ID NO: 3; V at a residue corresponding to residue 148 in SEQ ID NO: 4; M at a residue corresponding to residue 265 in SEQ ID NO: 4; Y at a residue corresponding to residue 265 in SEQ ID NO: 4; T at a residue corresponding to residue 266 in SEQ ID NO: 4; W at a residue corresponding to residue 267 in SEQ ID NO: 4; H at a residue corresponding to residue 284 in SEQ ID NO: 4; K at a residue corresponding to residue 75 in SEQ ID NO: 6; H at a residue corresponding to residue 128 in SEQ ID NO: 6; N at a residue corresponding to residue 229 in SEQ ID NO: 6; C at a residue corresponding to residue 231 in SEQ ID NO: 6; and/or Q at a residue corresponding to residue 303 in SEQ ID NO: 6.

[0128] In some embodiments, a PTE or PTER has hydrolase activity on VR, VX, GB, and GD. In some embodiments, the PTE or PTER comprises: L at a residue corresponding to residue 266 in SEQ ID NO: 3; and/or M at a residue corresponding to residue 266 in SEQ ID NO: 1.

[0129] In some embodiments, a PTE or PTER has hydrolase activity on VR and GD. In some embodiments, the PTE or PTER comprises: Y at a residue corresponding to residue 265 in SEQ ID NO: 1.

[0130] In some embodiments, a PTE or PTER has hydrolase activity on VR, GB, and GD. In some embodiments, the PTE or PTER comprises: H at a residue corresponding to residue 284 in SEQ ID NO: 1.

[0131] In some embodiments, a PTE or PTER comprises one or more of the amino acid substitutions discussed in Examples 2 and 5-6 and provided in Tables 7 and 9-10. In some embodiments, a PTE or PTER contains one or more amino acid substitutions in one or more residues within the active site. The active site of a PTE or a PTER may be identified by generating the three-dimensional structure of the PTE or PTER and identifying the residues within a particular distance of the catalytic center and/or within a particular distance of a docked substrate within the PTE or PTER. As used herein, a residue is within the active site of a PTE or PTER if it is within about 12 angstroms of the catalytic center of the PTE or PTER and/or within about 12 angstroms of a docked substrate within the PTE or PTER.

[0132] In some embodiments, a PTE or PTER contains one or more amino acid substitutions in one or more residues within the first shell. As used herein, a residue is within the first shell if it has at least one non-hydrogen atom within about 6 angstroms of the catalytic center of the PTE or PTER and/or has at least one non-hydrogen atom within about 6 angstroms of a docked substrate within the PTE or PTER.

[0133] In some embodiments, a PTE or PTER contains one or more amino acid substitutions in one or more residues within the second shell. As used herein, a residue is within the second shell if it has at least one non-hydrogen atom within about 8 angstroms of the catalytic center of the PTE or PTER and/or has at least one non-hydrogen atom within about 8 angstroms of a docked substrate within the PTE or PTER, but is not within the first shell.

[0134] In some embodiments, a PTE or PTER contains one or more amino acid substitutions in one or more residues within the third shell. As used herein, a residue is within the third shell if it has at least one non-hydrogen atom within about 10 angstroms of the catalytic center of the PTE or PTER and/or has at least one non-hydrogen atom within about 10 angstroms of a docked substrate within the PTE or PTER, but is not within the first or second shells.

[0135] In some embodiments, a PTE or PTER contains one or more amino acid substitutions in one or more residues within the fourth shell. As used herein, a residue is within the fourth shell if it has at least one non-hydrogen atom within about 12 angstroms of the catalytic center of the PTE or PTER and/or has at least one non-hydrogen atom within about 12 angstroms of a docked substrate within the PTE or PTER, but is not within the first, second, or third shells.

[0136] Without wishing to be bound by any theory, the first four shells of residues (shells 1-4) may be considered “around the active site.” In some embodiments, shells around the active site may be mutated to increase protein stability and/or protein activity.

[0137] In some embodiments, a PTE or PTER contains one or more mutations, for example, one or more substitutions, insertions and/or deletions in one or more distal residues. As used herein, a residue is a distal residue if it is not within shells 1-4. Without wishing to be bound by any theory, distal residues may be considered “outside of the active site.” In some embodiments, mutation of distal residues can increase protein stability.

[0138] In some embodiments, a PTE or a PTER comprises one or more mutations in one or more residues within the active site of the PTE or PTER. In some embodiments, the PTE or PTER comprises one or more mutations in one or more residues within the active site relative to a PTE provided by SEQ ID NO: 1. In some embodiments, the PTE comprises one or more mutations in one or more residues within the active site relative to a PTE provided by SEQ ID NO: 2. In some embodiments, the PTE comprises one or more mutations in one or more residues within the active site relative to a PTE provided by SEQ ID NO: 3. In some embodiments, the PTE comprises one or more mutations in one or more residues within the active site relative to a PTE provided by SEQ ID NO: 4. In some embodiments, the PTE comprises no more than 2 amino acid substitutions, insertions, additions or deletions relative to the sequence of any one of SEQ ID NOs: 1-4. In some embodiments, the PTER comprises one or more mutations in one or more residues within the active site relative to the PTER provided by SEQ ID NO: 6. In some embodiments, the PTER comprises no more than 2 amino acid substitutions, insertions, additions or deletions relative to the sequence of SEQ ID NO: 6.

[0139] In some embodiments, a PTE comprises an amino acid substitution relative to the sequence of SEQ ID NO: 1 at position Y98 within SEQ ID NO: 1. In some embodiments, the PTE comprises a Y98W substitution relative to the sequence of SEQ ID NO: 1. In some embodiments, a PTE comprises an amino acid substitution relative to the sequence of SEQ ID NO: 2 at position V244 within SEQ ID NO: 2. In some embodiments, the PTE comprises a V244C substitution relative to the sequence of SEQ ID NO: 2. In some embodiments, a PTE comprises an amino acid substitution relative to the sequence of SEQ ID NO: 4 at position N266 within SEQ ID NO: 4. In some embodiments, the PTE comprises a N266C substitution relative to the sequence of SEQ ID NO: 4.

[0140] In some embodiments, a PTE or PTER is tagged. For example, in some embodiments, a PTE or PTER is tagged with a StrepII tag at the C-terminus. In other embodiments, a PTE or PTER is tagged with a StrepII tag at the N-terminus. The Strep-tag® system is a method which allows the purification and detection of proteins by affinity chromatography. The Strep-tag II is a synthetic peptide consisting of eight amino acids (Trp-Ser-His-Pro-Gln-Phe-Glu-Lys). In some embodiments, a PTE or PTER can be tagged by using any system that is suitable for the purification and/or production processes of PTEs and/or PTERs.

[0141] In some embodiments, a PTE or PTER has hydrolase activity on an OPNA (e.g., on a V-agent and/or a G-agent) that is at least 5%, at least 10%, at least 15%, least 20%, at least 25%, at least 30%, least 35%, at least 40%, at least 45%, least 50%, at least 55%, at least 60%, at least 65%, at least 70%, least 75%, at least 80%, at least 85%, at least 90%, at least 95%, at least 100%, at least 200%, at least 300%, at least 400%, or at least 500% of the hydrolase activity of a reference PTE or PTER. In some embodiments, a PTE has hydrolase activity on VR that is at least 10% of the hydrolase activity of a reference PTE or PTER. In some embodiments, a PTE has hydrolase activity on VX that is at least 35% of the hydrolase activity of a reference PTE or PTER. In some embodiments, a reference PTE or PTER is any one of SEQ ID NOs: 1-8.

[0142] In some embodiments, a PTE or PTER that has at least one amino acid substitution relative to a reference PTE or PTER has hydrolase activity on an OPNA (e.g., on a V-agent and/or a G-agent) that is at least 5%, at least 10%, at least 15%, least 20%, at least 25%, at least 30%, least 35%, at least 40%, at least 45%, least 50%, at least 55%, at least 60%, at least 65%, at least 70%, least 75%, at least 80%, at least 85%, at least 90%, at least 95%, at least 100%, at least 200%, at least 300%, at least 400%, or at least 500% of the hydrolase activity of the reference PTE or PTER. In some embodiments, a reference PTE or PTER is any one of SEQ ID NOs: 1-8.

[0143] In some embodiments, a PTE or PTER is capable of eliciting lower immunogenicity when administered to a subject compared to a reference PTE or PTER. In some embodiments, the PTE or PTER is capable of eliciting lower immunogenicity by at least 10%, at least 15%, at least 20%, at least 25%, at least 30%, at least 35%, at least 40%, at least 45%, at least 50%, at least 55%, at least 60%, at least 65%, at least 70%, at least 71%, at least 72%, at least 73%, at least 74%, at least 75%, at least 76%, at least 77%, at least 78%, at least 79%, at least 80%, at least 81%, at least 82%, at least 83%, at least 84%, at least 85%, at least 86%, at least 87%, at least 88%, at least 89%, at least 90%, at least 91%, at least 92%, at least 93%, at least 94%, at least 95%, at least 96%, at least 97%, at least 98%, at least 99%, or 100%, compared with a reference PTE or PTER. In some embodiments, a reference PTE or PTER is any one of SEQ ID NOs: 1-8.

[0144] Without wishing to be bound by any theory, lower immunogenicity may indicate that a PTE or PTER elicits a lower or weaker neutralizing antibody response and/or a lower or weaker anaphylaxis-provoking response than a reference PTE or PTER. In some embodiments, the lower immunogenicity occurs upon repeated dosing of a PTE or PTER. In some embodiments, a reference PTE or PTER is any one of SEQ ID NOs: 1-8.

[0145] In some embodiments, immunogenicity can be determined by prediction of MHC-II binding using a publicly available algorithm. In some embodiments, an orthogonal sequence-based approach can be used for predicting immunogenicity based on comparison to human proteins.

[0146] Catalytic efficiency of enzymes associated with the disclosure for the hydrolysis of V-agents and/or G-agents can be shown as a K_{cat}/K_{M} value or ratio, or as a specificity constant. One of ordinary skill in the art would understand that a higher K_{cat}/K_{M} value generally corresponds to higher and better catalytic efficiency of an enzyme. A Kcaₜ/K_{M} value or ratio can be calculated by determining the ratio of K_{obs}, the first-order degradation constant, and [E], the enzyme concentration. Calculation of K_{cat}/K_{M} values is further discussed in Dawson et al. (Degradation of nerve agents by an organophosphate-degrading agent (OpdA); J Hazard Mater, (2008), 157(2-3):308-314), which is incorporated by reference in its entirety.

[0147] In some embodiments, a PTE or PTER has a K_{cat}/K_{M} value greater than 10 M⁻¹ min⁻¹, greater than 10² M⁻¹ min⁻¹, greater than 10³ M⁻¹ min⁻¹, greater than 10⁴ M⁻¹ min⁻¹, greater than 10⁵ M⁻¹ min⁻¹, greater than 10⁶ M⁻¹ min⁻¹, greater than 10⁷ M⁻¹ min⁻¹, greater than 10⁸ M⁻¹ min⁻¹, greater than 10⁹ M⁻¹ min⁻¹, or greater than 10¹⁰ M⁻¹ min⁻¹, including all values in between. In some embodiments, a PTE or PTER has a K_{cat}/K_{M} value greater than 10⁷ M⁻¹ min⁻¹. In some embodiments, a PTE or PTER having a Kcaₜ/K_{M} value greater than 10⁷ M⁻¹ min⁻¹ may efficiently catalyze nerve agents such as VX, VR, GB, and/or GD.

### Methods of Use of OPNA Hydrolyzing Enzymes

[0148] Aspects of the present disclosure relate to administering a PTE or PTER to hydrolyze or degrade an OPNA such as a V-agent or a G-agent. For example, enzymes that regulate hydrolysis of nerve agents described in this disclosure can be used for degrading OPNAs, such as V-agents and/or G-agents, and therefore relieving or reducing the toxicity to a subject caused by such OPNAs. In some embodiments, enzymes that hydrolyze nerve agents described in this disclosure can relieve or reduce debilitating symptoms caused by nerve agents as described in this disclosure.

[0149] Enzymes that regulate hydrolysis of nerve agents described in this disclosure include but are not limited to PTEs and PTERs. In some embodiments, enzymes that regulate hydrolysis of the nerve agents described in this disclosure are PTEs. In some embodiments, enzymes that regulate hydrolysis of nerve agents described in this disclosure are PTERs. In some embodiments, enzymes that regulate hydrolysis of nerve agents described in this disclosure can comprise any combination of OPNA hydrolyzing enzymes that is able to relieve or reduce the toxicity to a subject caused by an OPNA, such as a V-agent and/or a G-agent.

[0150] The present disclosure provides that a PTE or PTER can be used to hydrolyze or degrade an OPNA, such as a V-agent and/or a G-agent, or to treat, protect against, prevent, relieve, or reduce the toxicity to a subject caused by such OPNAs, such as V-agents and/or a G-agent. In some embodiments, treating protecting against, preventing, relieving, or reducing the toxicity involves hydrolyzing and/or neutralizing the nerve agents and/or stopping the spread of the nerve agents in a subject.

[0151] In some embodiments, the present disclosure provides a method of hydrolyzing or degrading VX. In some embodiments, the present disclosure provides a method of hydrolyzing or degrading VR. In some embodiments, the present disclosure provides a method of hydrolyzing or degrading GB. In some embodiments, the present disclosure provides a method of hydrolyzing or degrading GD. In some embodiments, methods include administering a PTE or PTER that comprises the sequence of any one of SEQ ID NOs: 1-4 or 6. In some embodiments, the PTE or PTER comprises a sequence that is at least 90% identical to any one of SEQ ID NOs: 1-4 and 6. In some embodiments, the present disclosure provides a method of hydrolyzing or degrading an OPNA, such as a V-agent and/or a G-agent, by administering a PTE or PTER that is capable of eliciting lower immunogenicity when administered to a subject compared to the immunogenicity elicited by an enzyme comprising the sequence of SEQ ID NO: 5.

[0152] Subjects associated with the disclosure include human and non-human subjects. In some embodiments, a non-human subject is a non-human primate. In some embodiments, a non-human subject is a companion animal or a farm animal. In some embodiments, the subject is a human subject. In some embodiments, the subject is a human subject having, suspected of having, or at risk of developing toxicity caused by a nerve agent such as VR, VX, GB, and/or GD. In some embodiments, the subject is affected by, suspected of being affected by, or at risk of being affected by toxicity caused by a nerve agent such as VR, VX, GB, and/or GD. In some embodiments, the subject is developing, will be developing, or has developed toxicity caused by a nerve agent such as VR, VX, GB, and/or GD.

[0153] Such a subject can be identified by routine examination, e.g., visual inspection, routine laboratory tests, physical exams, as would be understood by one of ordinary skill in the art. Cholinesterase levels can help establish a diagnosis and be an accurate predictor of prognosis. Without wishing to be bound by any theory, assays of red blood cell (RBC) AChE may provide information about the degree of toxicity and may inform whether subsequent dosing of oximes may be required. Follow up measurements of RBC AChE may demonstrate the reactivation of the enzyme over time and the effectiveness of treatment. If clinically suspected, a trial of atropine 1 mg in adults (0.01 mg/kg in children) can be used to assess for clinical improvement.

[0154] Such a subject may exhibit one or more symptoms or signs of toxicity such as weak muscle and urination. In some embodiments, such a subject may have one or more of risk factors associated with the development of the toxicity reactions including, in some embodiments, mutations or polymorphisms in one or more OPNA hydrolyzing enzymes in the subject.

[0155] In some embodiments, a PTE or PTER associated with the disclosure may be administered to a subject before the subject comes into contact with a V-agent and/or a G-agent. In such embodiments, the PTE or PTER may protect against or prevent harmful effects of the V-agent and/or G-agent on the subject.

[0156] In some embodiments, the PTE or PTER is expressed by bacteria to hydrolyze or degrade a V-agent and/or a G-agent, or to protect against, prevent, relieve, or reduce the toxicity to a subject caused by such V-agents and/or G-agents. In some embodiments, the bacteria (e.g., mutualistic or commensal flora) that express PTE or PTER are located on the skin of a subject. In some embodiments, the bacteria that express PTE or PTER are located in the gastrointestinal tract of a subject. In some embodiments, the bacteria that express PTE or PTER are located in the lungs of a subject. In some embodiments, the bacteria that express PTE or PTER are located in or on the eyes of a subject. In some embodiments, bacteria that express a PTE or PTER are administered to a subject.

[0157] Any of the OPNA hydrolyzing enzymes associated with the disclosure, including OPNA hydrolyzing enzymes expressed in or on a suitable cell type, or polynucleotides encoding OPNA hydrolyzing enzymes, can be administered to a human or an animal in need of a therapeutically effective amount of said enzyme for the purpose of treating, or providing pre- or post-exposure prophylaxis for, exposure of said human or animal to an OPNA, such as a V-agent and/or a G-agent.

[0158] In some embodiments, a cell that expresses an OPNA hydrolyzing enzyme is administered to a subject. The enzyme-expressing cell may be administered by any of a number of routes including, but not limited to, intraarterial, intravenous, intrathecal, intraperitoneal, intramuscular, intradermal, subdermal, cutaneous, transdermal, inhalation, intraocular, sublingual, buccal, otic, vaginal, rectal, nasal, or oral administration. The cell type used may depend on the route of administration; by way of non-limiting examples, human cells may be preferred for intravenous administration, whereas bacterial or yeast or fungal cells may be preferred for oral administration.

[0159] The administered enzyme-expressing cell may be contained, if necessary, in a suitable dosing formulation, well-known in the art to vary depending upon the chosen route of administration.

[0160] Any of the OPNA hydrolyzing enzymes associated with the disclosure, which optionally may be incorporated into carriers such as liposomes, or optionally may be modified by polymers such as polyethylene glycol or other suitable polymers, may be administered to a human or an animal in need of a therapeutically effective amount of said enzyme for the purpose of treating, or providing pre- or post-exposure prophylaxis for, exposure of said human or animal to an OPNA such as a V-agent and/or a G-agent.

[0161] In other embodiments, an OPNA hydrolyzing enzyme is administered to a subject. The enzyme may be administered by any of a number of routes including, but not limited to, intraarterial, intravenous, intrathecal, intraperitoneal, intramuscular, intradermal, subdermal, cutaneous, transdermal, inhalation, intraocular, sublingual, buccal, otic, vaginal, rectal, nasal, or oral administration.

[0162] The administered enzyme may be contained, if necessary, in a suitable dosing formulation, well-known in the art to vary depending upon the chosen route of administration.

[0163] In other embodiments, a polynucleotide that encodes an OPNA hydrolyzing enzyme is administered to a subject. The enzyme-encoding polynucleotide may be administered by any of a number of routes including, but not limited to, intraarterial, intravenous, intrathecal, intraperitoneal, intramuscular, intradermal, subdermal, cutaneous, transdermal, inhalation, intraocular, sublingual, buccal, otic, vaginal, rectal, nasal, or oral administration. In some embodiments, the polynucleotide is an RNA. In other embodiments, the polynucleotide is a DNA. The polynucleotide type used may depend on the route of administration; by way of non-limiting examples, RNA may be preferred for intramuscular administration, whereas DNA may be preferred for nasal administration.

[0164] The administered enzyme-encoding polynucleotide may be contained, if necessary, in a suitable dosing formulation, well-known in the art to vary depending upon the chosen route of administration; by way of non-limiting example, the formulation may comprise liposomes encapsulating the polynucleotide.

[0165] In some embodiments, the PTE or PTER is applied to or embedded or incorporated in a material such as a synthetic textile-like film that can be used to construct a protective suit. In some embodiments, the PTE or PTER is incorporated into materials such as textile-like films formed by nanoporous polymer membranes such as poly(isoprene-b-styrene-b-4-vinylpyridine) membranes and macroporous nylon supports. The PTE or PTER applied to or embedded or incorporated in the protective suit can hydrolyze or degrade a V-agent and/or a G-agent to protect against, prevent, relieve, or reduce the toxicity to a subject caused by such V-agents and/or G-agents. In some embodiments, the protective suit can be worn by a subject in need of protection against such V-agents and/or G-agents. In some embodiments, the protective suit is a uniform (e.g., an army uniform). In some embodiments, the PTE or PTER is in the form of a dried enzyme. In some embodiments, the PTE or PTER is dissolved in a liquid, such as a layer of liquid.

[0166] Any of the OPNA hydrolyzing enzymes associated with the disclosure, which optionally may be incorporated into carriers such as liposomes or living or dead cells, or optionally may be modified by polymers such as polyethylene glycol or other suitable polymers, may be impregnated in, or attached to using a suitable linking method, the fibers or fabric or surface of clothing or a wearable suit, for the purpose of degrading or destroying some or all of any OPNA, such as a V-agent and/or a G-agent, that contacts said clothing or suit.

[0167] An impregnated enzyme, optionally incorporated into carriers, may fill voids in the fibers, fabric, or surface, and may be retained by non-covalent molecular (van der Waals) forces and/or electrostatic forces. An attached enzyme, optionally incorporated into carriers, may be covalently linked to the fibers, fabric, or surface, for example by using ultraviolet (UV) light crosslinking, other similar non-specific crosslinking methods, or by using any of a wide variety of functional chemistry-specific or -general crosslinking agents, for example as described in ThermoFisher “Chemistry of Crosslinking” (https://www.thermofisher.com/us/en/home/life-science/protein-biology/protein-biology-leaming-center/protein-biology-resource-library/pierce-protein-methods/chemistry-crosslinking.html; accessed Mar. 22, 2021).

[0168] Examples of crosslinking agents include, but are not limited to, carboxyl-to-amine reactive groups such as carbodiimides; amine-reactive groups such as N-hydroxy-succinimide esters, imidoesters, pentafluorophenyl esters, and hydroxymethyl phosphines; sulfhydryl-reactive groups such as maleimides, haloacetyls (typically bromo- or iodo-), pyridyldisulfides, thiosulfonate, and vinylsulfones; and photoreactive groups, such as diazirines and aryl azides, and hydroxyl-reactive groups such as isocyanates.

[0169] Any of the OPNA hydrolyzing enzymes associated with the disclosure, which optionally may be incorporated into carriers such as liposomes or living or dead cells, or optionally may be modified by polymers such as polyethylene glycol or other suitable polymers, may be used to decontaminate solid or liquid or gaseous items contaminated by OPNAs, such as V-agents and/or G-agents, by contacting the contaminated item with the enzyme.

[0170] Contacting may be done in various ways including, but not limited to, for example, by passing gaseous or liquid items through or over a solution of enzyme (optionally in or on a carrier), or packed or fluidized beds of enzyme (optionally in or on a carrier) adsorbed or attached to or immobilized on a suitable packing medium (e.g. [suitably functionalized] agarose beads, polymeric beads, or silica particles) by spraying or otherwise depositing (e.g. mixing) dissolved, dried (freeze-dried or spray-dried), isolated, or immobilized enzyme (optionally in a carrier) onto or into solid, liquid, or gaseous items, including onto the surfaces of solid or liquid items.

[0171] Items to be decontaminated may include, but are not limited to, water and water supplies, air, soil, plants, permanent or temporary buildings, housing or other living spaces, offices or other work spaces, furniture, equipment, vehicles, clothing, foodstuffs, animals, humans, or animal or human skin.

[0172] In some embodiments, the PTE or PTER functions as a bioscavenger.

[0173] In some embodiments, methods described in this disclosure involve hydrolyzing a V-agent and/or a G-agent by at least 5%, 10%, 20%, 30%, 40%, 50%, 60%, 70%, 80%, 90%, or 100% more than that of a control, or by at least 2-fold, at least 5-fold, at least 10-fold, at least 20-fold, at least 50-fold, at least 100-fold, or at least 1000-fold compared to that of a control. In some embodiments, methods described in this disclosure comprise degrading a V-agent and/or a G-agent by at least 5%, 10%, 20%, 30%, 40%, 50%, 60%, 70%, 80%, 90%, 100%, more than that of a control, or by at least 2-fold, at least 5-fold, at least 10-fold, at least 20-fold, at least 50-fold, at least 100-fold, or at least 1000-fold compared to that of a control. In some embodiments, a control is a PTE or PTER comprising any one of SEQ ID NOs: 1-8.

[0174] In some embodiments, methods described in this disclosure comprise reducing the toxicity caused by a V-agent and/or a G-agent by at least 5%, 10%, 20%, 30%, 40%, 50%, 60%, 70%, 80%, 90%, 100%, or by at least 2-fold, at least 5-fold, at least 10-fold, at least 20-fold, at least 50-fold, at least 100-fold, or at least 1000-fold compared to the toxicity caused by the V-agent and/or G-agent in the absence of a PTE or PTER or in the presence of a control PTE or PTER. In some embodiments, methods described in this disclosure comprise relieving or reducing symptoms caused by a V-agent and/or a G-agent by at least 5%, 10%, 20%, 30%, 40%, 50%, 60%, 70%, 80%, 90%, 100%, or by at least 2-fold, at least 5-fold, at least 10-fold, at least 20-fold, at least 50-fold, at least 100-fold, or at least 1000-fold compared to the relief or reduction of symptoms in the absence of a PTE or PTER or in the presence of a control. In some embodiments, methods described in this disclosure comprise reducing immunogenicity by at least 5%, 10%, 20%, 30%, 40%, 50%, 60%, 70%, 80%, 90%, 100%, or by at least 2-fold, at least 5-fold, at least 10-fold, at least 20-fold, at least 50-fold, at least 100-fold, or at least 1000-fold compared to that of a control. In some embodiments, a control is a PTE or PTER comprising any one of SEQ ID NOs: 1-8.

[0175] The term “effective amount” or “amount effective” or “therapeutically effective amount” in the context of dose for administration to a subject refers to an amount of the dose that produces one or more desired responses in a subject. An effective amount can involve reducing the level of an undesired response. An effective amount can also involve delaying the occurrence or onset of an undesired response. An effective amount can also involve enhancing the level of a desired response such as a therapeutic endpoint or result. In some embodiments, administration of a PTE or PTER results in a preventative result or therapeutic result or endpoint with respect to the symptoms of toxicity caused by a V-agent such as VR or VX and/or a G-agent such as GB or GD. The achievement of any of the foregoing can be monitored by routine methods and/or any of the methods disclosed in the present application.

[0176] Effective amounts will depend on the particular subject being treated; the severity of a condition; the individual patient parameters including age, physical condition, size and weight; the duration of the treatment; the nature of concurrent therapy (if any); the specific route of administration and like factors.

### Human Microbiome Commensals

[0177] Commensals can be generated that express PTE or PTER. In some embodiments, species of Lactobacillus sp., which can have beneficial effects if applied on the skin or administered orally, are used to generate commensals. Non-limiting examples include L. delbrueckii, L. plantarum, L. rhamnosus, L. reuteri, L. paracasei, L. johnsonii, and L. lacti;

[0178] Probiotic bacteria selected for oral administration, include but are not limited to: Bifidobacteria sp., E. coli (for example, E. coli Nissle 1917), Bacteroides (for example, B. thetaiotaomicron), and Lactococcus sp.; or yeasts including Saccharomyces bulardii.

[0179] Bacteria selected from natural skin commensals for skin application include but are not limited to: Corynebacterium sp., Staphylococcus sp. (for example, S. epidermidis and S. hominis), Propionibacterium sp., Streptococcus sp., Micrococcus sp., Betaproteobacterium sp., Brevibacterium sp., and Dermabacter sp.; or fungi including Malassezia sp., Aspergillus sp., and Candida sp.

[0180] Bacteria selected from natural lung commensals for lung application include but are not limited to: Pseudomonas sp., Streptococcus sp., Prevotella sp., Fusobacterium sp., Haemophilus sp., Veillonella sp., and Porphyromonas sp.

[0181] Bacteria selected from natural eye commensals for eye application include but are not limited to: Staphylococcus sp., Propionibacterium sp., Corynebacterium sp., Staphylococci sp., and Pseudomonas sp.

[0182] Microbial strains can be engineered to express a PTE or PTER (e.g., a PTE or PTER having an amino acid sequence described herein, or having a sequence at least 80, 85, 90 or 95% identical to an amino acid sequence described herein) by introduction into the microbe a nucleic acid (e.g., a self-replicating plasmid, or a heterologous nucleic acid integrated into a chromosome, etc.) comprising a nucleotide sequence encoding a PTE or PTER. Any of the standard protocols well-known in the field for introducing nucleic acids into a microorganism can be used, e.g., those described in: Sambrook et al., 2012, Molecular Cloning: A Laboratory Manual, volumes 1-4, Cold Spring Harbor Press, NY; Nat Methods. (2008) 5(2): 135-146; Frenzel et al. Front Immunol. (2013) 4: 217; and Kunert and Reinhart, Appl Microbiol Biotechnol. (2016) 100: 3451-3461), and in other bacteriology, virology and molecular biology manuals. Viruses and phages, which are useful as vectors, can be used for introducing nucleic acids into mammalian and bacterial cells. Examples include, but are not limited to, retroviruses, adenoviruses, adeno-associated viruses, herpes viruses, and lentiviruses. In general, a suitable vector contains an origin of replication functional in at least one organism, a promoter sequence, convenient restriction endonuclease sites, and one or more selectable markers, (e.g., WO 01/96584; WO 01/29058; and U.S. Pat. No. 6,326,193).

[0183] Selected strains can be engineered for expression of the recombinant constructs using transformation methods including electroporation and conjugation techniques, such as those described in Sambrook et al., 2012. Electroporation can be executed as in Grosser and Richardson 2014 (DOI 10.1007/7651_2014_183, for S. epidermidis), or Welker et al., 2015 (doi: 10.1093/femsle/fnu033 for Lactobacillus). Conjugation techniques enable the transformation of the target strain by transferring a mobilized plasmid from a donor strain; the latter can be, as non-limiting examples: B. subtilis or E. coli, as in Samperio et al., 2021 (doi: 10.3389/fmicb.2021.606629, for Lactobacillus and Staphylococcus sp.).

[0184] Strain commensals engineered as described above can be cultured, isolated and formulated for application to human skin.

[0185] For example, a strain commensal can be constructed by introduction of a gene encoding a PTE or PTER (e.g., a PTE or PTER having an amino acid sequence described herein, or having a sequence at least 80, 85, 90 or 95% identical to an amino acid sequence described herein) on a suitable vector (e.g., a plasmid, suicide vector, heterologous nucleic acid designed for homologous introduction into a chromosome, etc.). The coding segment for the PTE or PTER can be operably linked to a promoter at the 5′-end and, optionally, a terminator at the 3′-end. The vector can be designed to comprise a selectable marker (e.g., an antibiotic marker, a gene necessary for growth of the bacterium, a fluorescence marker, etc.), such that the bacteria comprising the vector (and therefore the PTE or PTER gene) can be easily selected. Optionally, in the case of a self-replicating vector such as a plasmid, the vector can comprise an origin of replication and any additional factors (e.g., a replicase) required for replication at the original of replication within the microbe. In the case of a suicide vector or a heterologous nucleic acid designed for homologous recombination into a chromosome, no origin of replication is required.

[0186] The cells can be grown in fermentation media and conditions appropriate for each species, including rich media (for example Tryptic Soy Broth, TSB, or other media formulations with yeast extract and tryptone) and minimal media with nitrogen sources, carbohydrates, salts, and micronutrients. The cells are grown to sufficient densities, isolated from the fermentation broth, and then lyophilized for storage in a viable and non-proliferative stage.

[0187] For application to the skin, a microbe expressing a PTE or PTER can be formulated in an administration vehicle such as a liquid, lotion, ointment, cream or gel suitable for rubbing. spraying or other methods of administration to the skin. The administration vehicle can also optionally comprise various other components such as: a colorant, a nutrient nutritious to the microbe, a scent, a sunblock, a deodorant (e.g., an agent capable of reducing sweat malodor, which may be the microbe or another agent added to the administration vehicle), an antiperspirant, a moisturizer, etc. The formulation can then be applied to selected area of the skin at different concentrations ranging from 10⁶ CFU/mL to 10⁸ CFU/mL.

[0188] In the case of a microbe comprising a gene for a PTE or PTER and intended for human consumption, the microbe can be one suitable for growth within the human digestive tract including but not limited to a probiotic microbe described herein. Non-limiting examples of microorganisms suitable for human consumption include: Lactobacillus species such as L. bulgaricus, L. plantarum, L. paraplantarum, L. corynformis, L. brevis, L. acidophilus, L. rhamnosus, L. helveticus, L. kefiranofaciens, and L. lactis; Streptococcus species such as S. thermophilus; Leuconostoc species such as L. mesenteroides, L. citreum, and L. argentinum; and Pediococcus species such as P. pentosaceus. Additional non-limiting examples of microbes expressing a PTE or PTER for human consumption include Saccharomyces boulardii, Bifidobacterium bifidum, Bacillus coagulans, Gluconacetobacter xylinus, Acetobacter pasteurianus, Acetobacter aceti, Gluconobacter oxydans and Zygosaccharomyces species.

[0189] The microbe can be administered as a component in an administration vehicle which can be, for example, a food (e.g., a yogurt), a pill, a pellet, a gelcap, wherein the administration vehicle can further comprise any one or more of: a colorant, a flavor, a bulking agent, a sweetener. The administration vehicle can be, or can be a component in or combined with, a food (e.g., a meat, a vegetable, a starch) or a drink or other liquid or solid intended for human consumption. In various means of application, the administration vehicle can be administered orally (e.g., as a food, pill) or anally (e.g., as a suppository).

[0190] In the case of administration to either the skin or the digestive tract, the administration vehicle can further comprise a matrix optionally comprising additional components as part of the formulation, including cryo- and lyoprotectants, such as carbohydrates and peptides, and fatty alcohols.

[0191] Optionally, microbes which are administered to the digestive system can comprise lyophilized but viable cells. Additional steps of reactivation may be included, wherein the lyophilized cells undergo subsequent cycles of growth to achieve the desired seed inoculum.

### Compositions, Kits, and Administration

[0192] The present disclosure provides compositions, including pharmaceutical compositions, comprising one or more PTEs or PTERs, and optionally a pharmaceutically acceptable excipient. In certain embodiments, a PTE or PTER described in this application is provided in an effective amount in a composition such as a pharmaceutical composition. Compositions, such as pharmaceutical compositions, described in this application can be prepared by any method known in the art.

[0193] Pharmaceutical compositions can be prepared, packaged, and/or sold in bulk, as a single unit dose, and/or as a plurality of single unit doses. A “unit dose” is a discrete amount of a pharmaceutical composition comprising a predetermined amount of an active ingredient. The amount of the active ingredient is generally equal to the dosage of the active ingredient which would be administered to a subject and/or a convenient fraction of such a dosage, such as one-half or one-third of such a dosage.

[0194] Relative amounts of the active ingredient, the pharmaceutically acceptable excipient, and/or any additional ingredients in a pharmaceutical composition described in this application will vary, depending upon the identity, size, and/or condition of the subject treated and further depending upon the route by which the composition is to be administered. The composition may comprise, e.g., between 0.1% and 100% (w/w) active ingredient.

[0195] The term “pharmaceutically acceptable excipient” or “pharmaceutically acceptable carrier” means a pharmacologically inactive material used together with a pharmacologically active material to formulate the compositions. Pharmaceutically acceptable excipients comprise a variety of materials known in the art, including but not limited to saccharides (such as glucose, lactose, and the like), preservatives such as antimicrobial agents, reconstitution aids, colorants, saline (such as phosphate buffered saline), and buffers. Any one of the compositions provided in the present application may include a pharmaceutically acceptable excipient or carrier.

[0196] Pharmaceutically acceptable excipients used in the manufacture of pharmaceutical compositions can include inert diluents, dispersing and/or granulating agents, surface active agents and/or emulsifiers, disintegrating agents, binding agents, preservatives, buffering agents, lubricating agents, and/or oils. Excipients such as cocoa butter and suppository waxes, coloring agents, coating agents, sweetening, flavoring, and perfuming agents may also be present in the composition. Exemplary excipients include diluents, dispersing and/or granulating agents, surface active agents and/or emulsifiers, disintegrating agents, binding agents, preservatives, buffering agents, lubricating agents, and/or oils (e.g., synthetic oils, semi-synthetic oils).

[0197] The term “pharmaceutically acceptable salt” refers to those salts which are, within the scope of sound medical judgment, suitable for use in contact with the tissues of humans and lower animals without undue toxicity and the like, and are commensurate with a reasonable benefit/risk ratio. Pharmaceutically acceptable salts are well known in the art. For example, Berge et al., describe pharmaceutically acceptable salts in detail in J. Pharmaceutical Sciences, 1977, 66, 1-19, which is incorporated by reference in its entirety. Pharmaceutically acceptable salts of the compounds disclosed in this application include those derived from suitable inorganic and organic acids and bases. Examples of pharmaceutically acceptable, nontoxic acid addition salts are salts of an amino group formed with inorganic acids such as hydrochloric acid, hydrobromic acid, phosphoric acid, sulfuric acid, and perchloric acid or with organic acids such as acetic acid, oxalic acid, maleic acid, tartaric acid, citric acid, succinic acid, or malonic acid or by using other methods known in the art such as ion exchange. Other pharmaceutically acceptable salts include adipate, alginate, ascorbate, aspartate, benzenesulfonate, benzoate, bisulfate, borate, butyrate, camphorate, camphorsulfonate, citrate, cyclopentanepropionate, digluconate, dodecylsulfate, ethanesulfonate, formate, fumarate, glucoheptonate, glycerophosphate, gluconate, hemisulfate, heptanoate, hexanoate, hydroiodide, 2-hydroxy-ethanesulfonate, lactobionate, lactate, laurate, lauryl sulfate, malate, maleate, malonate, methanesulfonate, 2-naphthalenesulfonate, nicotinate, nitrate, oleate, oxalate, palmitate, pamoate, pectinate, persulfate, 3-phenylpropionate, phosphate, picrate, pivalate, propionate, stearate, succinate, sulfate, tartrate, thiocyanate, p-toluenesulfonate, undecanoate, valerate salts, and the like. Salts derived from appropriate bases include alkali metal, alkaline earth metal, ammonium and N+(C1-4 alkyl)4-salts. Representative alkali or alkaline earth metal salts include sodium, lithium, potassium, calcium, magnesium, and the like. Further pharmaceutically acceptable salts include, when appropriate, nontoxic ammonium, quaternary ammonium, and amine cations formed using counterions such as halide, hydroxide, carboxylate, sulfate, phosphate, nitrate, lower alkyl sulfonate, and aryl sulfonate.

[0198] Exemplary diluents can include calcium carbonate, sodium carbonate, calcium phosphate, dicalcium phosphate, calcium sulfate, calcium hydrogen phosphate, sodium phosphate lactose, sucrose, cellulose, microcrystalline cellulose, kaolin, mannitol, sorbitol, inositol, sodium chloride, dry starch, cornstarch, powdered sugar, and mixtures thereof.

[0199] Exemplary granulating and/or dispersing agents can include potato starch, corn starch, tapioca starch, sodium starch glycolate, clays, alginic acid, guar gum, citrus pulp, agar, bentonite, cellulose, and wood products, natural sponge, cation-exchange resins, calcium carbonate, silicates, sodium carbonate, cross-linked poly(vinyl-pyrrolidone) (crospovidone), sodium carboxymethyl starch (sodium starch glycolate), carboxymethyl cellulose, cross-linked sodium carboxymethyl cellulose (croscarmellose), methylcellulose, pregelatinized starch (starch 1500), microcrystalline starch, water insoluble starch, calcium carboxymethyl cellulose, magnesium aluminum silicate (Veegum), sodium lauryl sulfate, quaternary ammonium compounds, and mixtures thereof.

[0200] Exemplary surface active agents and/or emulsifiers can include natural emulsifiers (e.g., acacia, agar, alginic acid, sodium alginate, tragacanth, chondrux, cholesterol, xanthan, pectin, gelatin, egg yolk, casein, wool fat, cholesterol, wax, and lecithin), colloidal clays (e.g., bentonite (aluminum silicate) and Veegum (magnesium aluminum silicate)), long chain amino acid derivatives, high molecular weight alcohols (e.g., stearyl alcohol, cetyl alcohol, oleyl alcohol, triacetin monostearate, ethylene glycol distearate, glyceryl monostearate, and propylene glycol monostearate, polyvinyl alcohol), carbomers (e.g., carboxy polymethylene, polyacrylic acid, acrylic acid polymer, and carboxyvinyl polymer), carrageenan, cellulosic derivatives (e.g., carboxymethylcellulose sodium, powdered cellulose, hydroxymethyl cellulose, hydroxypropyl cellulose, hydroxypropyl methylcellulose, methylcellulose), sorbitan fatty acid esters (e.g., polyoxyethylene sorbitan monolaurate (Tween® 20), polyoxyethylene sorbitan (Tween® 60), polyoxyethylene sorbitan monooleate (Tween® 80), sorbitan monopalmitate (Span® 40), sorbitan monostearate (Span® 60), sorbitan tristearate (Span® 65), glyceryl monooleate, sorbitan monooleate (Span® 80), polyoxyethylene esters (e.g., polyoxyethylene monostearate (Myrj® 45), polyoxyethylene hydrogenated castor oil, polyethoxylated castor oil, polyoxymethylene stearate, and Solutol®), sucrose fatty acid esters, polyethylene glycol fatty acid esters (e.g., Cremophor*), polyoxyethylene ethers, (e.g., polyoxyethylene lauryl ether (Brij® 30)), poly(vinyl-pyrrolidone), diethylene glycol monolaurate, triethanolamine oleate, sodium oleate, potassium oleate, ethyl oleate, oleic acid, ethyl laurate, sodium lauryl sulfate, Pluronic® F-68, poloxamer P-188, cetrimonium bromide, cetylpyridinium chloride, benzalkonium chloride, docusate sodium, and/or mixtures thereof.

[0201] Exemplary binding agents can include starch (e.g., cornstarch and starch paste), gelatin, sugars (e.g., sucrose, glucose, dextrose, dextrin, molasses, lactose, lactitol, mannitol, etc.), natural and synthetic gums (e.g., acacia, sodium alginate, extract of Irish moss, panwar gum, ghatti gum, mucilage of isapol husks, carboxymethylcellulose, methylcellulose, ethylcellulose, hydroxyethylcellulose, hydroxypropyl cellulose, hydroxypropyl methylcellulose, microcrystalline cellulose, cellulose acetate, poly(vinyl-pyrrolidone), magnesium aluminum silicate (Veegum®), and larch arabogalactan), alginates, polyethylene oxide, polyethylene glycol, inorganic calcium salts, silicic acid, polymethacrylates, waxes, water, alcohol, and/or mixtures thereof.

[0202] Exemplary preservatives can include antioxidants, chelating agents, antimicrobial preservatives, antifungal preservatives, antiprotozoan preservatives, alcohol preservatives, acidic preservatives, and other preservatives. In certain embodiments, the preservative is an antioxidant. In other embodiments, the preservative is a chelating agent.

[0203] Exemplary antioxidants can include alpha tocopherol, ascorbic acid, acorbyl palmitate, butylated hydroxyanisole, butylated hydroxytoluene, monothioglycerol, potassium metabisulfite, propionic acid, propyl gallate, sodium ascorbate, sodium bisulfite, sodium metabisulfite, and sodium sulfite.

[0204] Exemplary chelating agents can include ethylenediaminetetraacetic acid (EDTA) and salts and hydrates thereof (e.g., sodium edetate, disodium edetate, trisodium edetate, calcium disodium edetate, dipotassium edetate, and the like), citric acid and salts and hydrates thereof (e.g., citric acid monohydrate), fumaric acid and salts and hydrates thereof, malic acid and salts and hydrates thereof, phosphoric acid and salts and hydrates thereof, and tartaric acid and salts and hydrates thereof. Exemplary antimicrobial preservatives can include benzalkonium chloride, benzethonium chloride, benzyl alcohol, bronopol, cetrimide, cetylpyridinium chloride, chlorhexidine, chlorobutanol, chlorocresol, chloroxylenol, cresol, ethyl alcohol, glycerin, hexetidine, imidurea, phenol, phenoxyethanol, phenylethyl alcohol, phenylmercuric nitrate, propylene glycol, and thimerosal.

[0205] Exemplary antifungal preservatives can include butyl paraben, methyl paraben, ethyl paraben, propyl paraben, benzoic acid, hydroxybenzoic acid, potassium benzoate, potassium sorbate, sodium benzoate, sodium propionate, and sorbic acid.

[0206] Exemplary alcohol preservatives can include ethanol, polyethylene glycol, phenol, phenolic compounds, bisphenol, chlorobutanol, hydroxybenzoate, and phenylethyl alcohol.

[0207] Exemplary acidic preservatives can include vitamin A, vitamin C, vitamin E, beta-carotene, citric acid, acetic acid, dehydroacetic acid, ascorbic acid, sorbic acid, and phytic acid.

[0208] Other preservatives can include tocopherol, tocopherol acetate, deteroxime mesylate, cetrimide, butylated hydroxyanisol (BHA), butylated hydroxytoluened (BHT), ethylenediamine, sodium lauryl sulfate (SLS), sodium lauryl ether sulfate (SLES), sodium bisulfite, sodium metabisulfite, potassium sulfite, potassium metabisulfite, Glydant® Plus, Phenonip®, methylparaben, Germall® 115, Germaben® II, Neolone®, Kathon®, and Euxyl®.

[0209] Exemplary buffering agents can include citrate buffer solutions, acetate buffer solutions, phosphate buffer solutions, ammonium chloride, calcium carbonate, calcium chloride, calcium citrate, calcium glubionate, calcium gluceptate, calcium gluconate, D-gluconic acid, calcium glycerophosphate, calcium lactate, propanoic acid, calcium levulinate, pentanoic acid, dibasic calcium phosphate, phosphoric acid, tribasic calcium phosphate, calcium hydroxide phosphate, potassium acetate, potassium chloride, potassium gluconate, potassium mixtures, dibasic potassium phosphate, monobasic potassium phosphate, potassium phosphate mixtures, sodium acetate, sodium bicarbonate, sodium chloride, sodium citrate, sodium lactate, dibasic sodium phosphate, monobasic sodium phosphate, sodium phosphate mixtures, tromethamine, magnesium hydroxide, aluminum hydroxide, alginic acid, pyrogen-free water, isotonic saline, Ringer's solution, ethyl alcohol, and mixtures thereof.

[0210] In some embodiments, compositions comprising one or more PTE or PTERs are formulated for subcutaneous injection. In some embodiments, compositions comprising one or more PTE or PTERs are formulated for intramuscular injection. Compositions described in this disclosure can be administered via any route that is suitable for the composition and the subject in need thereof.

[0211] Injectable preparations, for example sterile injectable aqueous or oleaginous suspensions, can be formulated according to known methods using suitable dispersing or wetting agents and suspending agents. The sterile injectable preparation can be a sterile injectable solution, suspension, or emulsion in a nontoxic parenterally acceptable diluent or solvent, for example, as a solution in 1,3-butanediol. Among the acceptable vehicles and solvents that can be employed are water, Ringer's solution, U.S.P., and isotonic sodium chloride solution. In addition, sterile, fixed oils are conventionally employed as a solvent or suspending medium. For this purpose, any bland fixed oil can be employed, including synthetic mono- or di-glycerides. In addition, fatty acids such as oleic acid can be used in the preparation of injectables. The injectable formulations can be sterilized, for example, by filtration through a bacterial-retaining filter, or by incorporating sterilizing agents in the form of sterile solid compositions, which can be dissolved or dispersed in sterile water or other sterile injectable medium prior to use.

[0212] Although the descriptions of pharmaceutical compositions provided in this application are principally directed to pharmaceutical compositions which are suitable for administration to humans, it will be understood by the skilled artisan that such compositions are generally suitable for administration to animals of all sorts. Modification of pharmaceutical compositions suitable for administration to humans in order to render the compositions suitable for administration to various animals is well understood, and the ordinarily skilled veterinary pharmacologist can design and/or perform such modification with ordinary experimentation.

[0213] PTE or PTERs provided in this application are typically formulated in dosage unit form for ease of administration and uniformity of dosage. It will be understood, however, that the total daily usage of the compositions described in this application can be decided by a physician within the scope of sound medical judgment. The specific therapeutically effective dose level for any particular subject or organism will depend upon a variety of factors including the level of toxicity, the age, body weight, general health, and gender of the subject; the time of administration, route of administration, and rate of excretion of the specific active ingredient employed; the duration of the treatment; the PTE or PTER used in combination or coincidental with the specific active ingredient employed; and like factors well known in the medical arts.

[0214] In some embodiments, the PTE or PTER or compositions disclosed in this application are formulated and/or administered in nanoparticles. Nanoparticles are particles in the nanoscale. In some embodiments, nanoparticles are less than 1 μm in diameter. In some embodiments, nanoparticles are between about 1 and 100 nm in diameter. Nanoparticles include organic nanoparticles, such as dendrimers, liposomes, or polymeric nanoparticles. Nanoparticles also include inorganic nanoparticles, such as fullerenes, quantum dots, and gold nanoparticles. Compositions may comprise an aggregate of nanoparticles. In some embodiments, the aggregate of nanoparticles is homogeneous, while in other embodiments the aggregate of nanoparticles is heterogeneous.

[0215] The exact amount of a PTE or PTER, or composition comprising a PTE or PTER, required to achieve an effective amount will vary from subject to subject, depending, for example, on age, and general condition of a subject, mode of administration, and the like. An effective amount may be included in a single dose (e.g., single oral dose) or multiple doses (e.g., multiple oral doses). In certain embodiments, when multiple doses are administered to a subject or applied to a tissue or cell, any two doses of the multiple doses include different or substantially the same amounts of an enzyme described in this application. Dosage forms may be administered at a variety of frequencies. In certain embodiments, when multiple doses are administered to a subject, the frequency of administering the multiple doses to the subject is three doses a day, two doses a day, one dose a day, one dose every other day, one dose every third day, one dose every week, one dose every two weeks, one dose every three weeks, or one dose every four weeks, or less frequent than every four weeks. In certain embodiments, the frequency of administering the multiple doses to the subject is one dose per day. In certain embodiments, the frequency of administering the multiple doses to the is two doses per day. In certain embodiments, the frequency of administering the multiple doses to the subject is three doses per day. In certain embodiments, when multiple doses are administered to a subject, the duration between the first dose and last dose of the multiple doses is one day, two days, four days, one week, two weeks, three weeks, one month, two months, three months, four months, six months, nine months, one year, two years, three years, four years, five years, seven years, ten years, fifteen years, twenty years, or the lifetime of the subject. In certain embodiments, the duration between the first dose and last dose of the multiple doses is three months, six months, or one year. In certain embodiments, the duration between the first dose and last dose of the multiple doses is the lifetime of the subject. In some embodiments, dose ranging studies can be conducted to establish optimal therapeutic or effective amounts of the component(s) to be present in dosage forms. In embodiments, the component(s) are present in dosage forms in an amount effective to generate a preventative or therapeutic response to various symptoms of toxicity caused by an OPNA such as a V-agent and/or a G-agent.

[0216] Compositions as described in this application can be administered in combination with one or more additional pharmaceutical agents (e.g., therapeutically and/or prophylactically active agents). The compounds or compositions can be administered in combination with additional pharmaceutical agents that improve their activity, improve bioavailability, improve safety, reduce and/or modify metabolism, inhibit excretion, and/or modify distribution in a subject.

[0217] Pharmaceutical agents include therapeutically active agents. Pharmaceutical agents also include prophylactically active agents. Pharmaceutical agents include small organic molecules such as drug compounds (e.g., compounds approved for human or veterinary use by the U.S. Food and Drug Administration as provided in the Code of Federal Regulations (CFR)), peptides, proteins, carbohydrates, monosaccharides, oligosaccharides, polysaccharides, nucleoproteins, mucoproteins, lipoproteins, synthetic polypeptides or proteins, small molecules linked to proteins, glycoproteins, steroids, nucleic acids, DNAs, RNAs, nucleotides, nucleosides, oligonucleotides, antisense oligonucleotides, lipids, hormones, vitamins, and cells. In certain embodiments, the additional pharmaceutical agent is a pharmaceutical agent useful for hydrolyzing or degrading a V-agent, or alleviating the symptoms or toxicity caused by a V-agent and/or a G-agent. In some embodiments, compositions can be administered concurrently with, prior to, or subsequent to one or more additional pharmaceutical agents.

[0218] Also encompassed by the disclosure are kits (e.g., pharmaceutical packs) comprising a composition comprising one or more PTE or PTER for use in administering the composition for hydrolyzing or degrading an OPNA such as a V-agent and/or a G-agent. The kits provided may comprise a composition, such as a pharmaceutical composition comprising a PTE or PTER described in this application, and a container (e.g., a vial, ampule, bottle, syringe, and/or dispenser package, or other suitable container). In some embodiments, provided kits may optionally further include a second container comprising a pharmaceutical excipient for dilution or suspension of a pharmaceutical composition or a PTE or PTER described in this application. Thus, in one aspect, provided are kits including a container comprising a composition, PTE, or PTER described in this application.

[0219] In certain embodiments, a kit described in this application further includes instructions for using the kit. A kit may also include information as required by a regulatory agency such as the U.S. Food and Drug Administration (FDA). In certain embodiments, the information included in the kits is prescribing information. A kit may also include one or more additional pharmaceutical agents described in this application as a separate composition.

### Host Cells

[0220] The term “host cell” refers to a cell that can be used to express a polynucleotide, such as a polynucleotide that encodes a OPNA hydrolyzing enzyme, such as a V-agent hydrolyzing enzyme and/or a G-agent hydrolyzing enzyme. The terms “genetically modified host cell,” “recombinant host cell,” and “recombinant strain” are used interchangeably and refer to a host cell that has been genetically modified by, e.g., cloning and transformation methods, or by other methods known in the art (e.g., selective editing methods). Thus, the terms include a host cell (e.g., bacterial cell, yeast cell, fungal cell, insect cell, plant cell, mammalian cell, human cell, etc.) that has been genetically altered, modified, or engineered, so that it exhibits an altered, modified, or different genotype and/or phenotype, as compared to the naturally-occurring cell from which it was derived. It is understood that the term “cell,” as used in this application, may refer to a single cell or a population of cells, such as a population of cells belonging to the same cell line or strain. Use of the singular term “cell” should not be construed to refer explicitly to a single cell rather than a population of cells.

[0221] The term “heterologous” with respect to a polynucleotide, such as a polynucleotide comprising a gene, is used interchangeably with the term “exogenous” and the term “recombinant” and refers to: a polynucleotide that has been artificially supplied to a biological system; a polynucleotide that has been modified within a biological system, or a polynucleotide whose expression or regulation has been manipulated within a biological system. A heterologous polynucleotide that is introduced into or expressed in a host cell may be a polynucleotide that comes from a different organism or species from the host cell, or may be a synthetic polynucleotide, or may be a polynucleotide that is also endogenously expressed in the same organism or species as the host cell. For example, a polynucleotide that is endogenously expressed in a host cell may be considered heterologous when it is situated non-naturally in the host cell; expressed recombinantly in the host cell, either stably or transiently; modified within the host cell; selectively edited within the host cell; expressed in a copy number that differs from the naturally occurring copy number within the host cell; or expressed in a non-natural way within the host cell, such as by manipulating regulatory regions that control expression of the polynucleotide. In some embodiments, a heterologous polynucleotide is a polynucleotide that is endogenously expressed in a host cell but whose expression is driven by a promoter that does not naturally regulate expression of the polynucleotide. In other embodiments, a heterologous polynucleotide is a polynucleotide that is endogenously expressed in a host cell and whose expression is driven by a promoter that does naturally regulate expression of the polynucleotide, but the promoter or another regulatory region is modified. In some embodiments, the promoter is recombinantly activated or repressed. For example, gene-editing based techniques may be used to regulate expression of a polynucleotide, including an endogenous polynucleotide, from a promoter, including an endogenous promoter. See, e.g., Chavez et al., Nat Methods. 2016 July; 13(7): 563-567. A heterologous polynucleotide may comprise a wild-type sequence or a mutant sequence as compared with a reference polynucleotide sequence.

[0222] Suitable host cells include, but are not limited to: yeast cells, bacterial cells (including Gram-positive and Gram-negative cells), archaebacteria, algal cells, plant cells, fungal cells, lichen, corals, insect cells, invertebrate cells, insect cells, fish cells, bird cells, reptile cells, amphibian cells, animal cells, including mammalian cells, and human cells.

[0223] Suitable yeast host cells include, but are not limited to: Candida, Hansenula, Saccharomyces, Schizosaccharomyces, Pichia, Kluyveromyces, and Yarrowia. In some embodiments, the yeast cell is Hansenula polymorpha, Saccharomyces cerevisiae, Saccaromyces carlsbergensis, Saccharomyces diastaticus, Saccharomyces norbensis, Saccharomyces kluyveri, Schizosaccharomyces pombe, Komagataella phaffii, formerly known as Pichia pastoris, Pichia finlandica, Pichia trehalophila, Pichia kodamae, Pichia membranaefaciens, Pichia opuntiae, Pichia thermotolerans, Pichia salictaria, Pichia quercuum, Pichia pijperi, Pichia stipitis, Pichia methanolica, Pichia angusta, Kluyveromyces lactis, Candida albicans, or Yarrowia lipolytica.

[0224] In some embodiments, the yeast strain is an industrial polyploid yeast strain. Other non-limiting examples of fungal cells include cells obtained from Aspergillus spp., Penicillium spp., Fusarium spp., Rhizopus spp., Acremonium spp., Neurospora spp., Sordaria spp., Magnaporthe spp., Allomyces spp., Ustilago spp., Botrytis spp., and Trichoderma spp.

[0225] In certain embodiments, the host cell is an algal cell such as, Chlamydomonas (e.g., C. Reinhardtii) and Phormidium (P. sp. ATCC29409).

[0226] In other embodiments, the host cell is a prokaryotic cell. Suitable prokaryotic cells include gram-positive, gram-negative, and gram-variable bacterial cells. The host cell may be a species of, but not limited to: Agrobacterium, Alicyclobacillus, Anabaena, Anacystis, Acinetobacter, Acidothermus, Arthrobacter, Azobacter, Bacillus, Bifidobacterium, Brevibacterium, Butyrivibrio, Buchnera, Campestris, Camplyobacter, Clostridium, Corynebacterium, Chromatium, Coprococcus, Escherichia, Enterococcus, Enterobacter, Erwinia, Fusobacterium, Faecalibacterium, Francisella, Flavobacterium, Geobacillus, Haemophilus, Helicobacter, Klebsiella, Lactobacillus, Lactococcus, Ilyobacter, Micrococcus, Microbacterium, Mesorhizobium, Methylobacterium, Methylobacterium, Mycobacterium, Neisseria, Pantoea, Pseudomonas, Prochlorococcus, Rhodobacter, Rhodopseudomonas, Rhodopseudomonas, Roseburia, Rhodospirillum, Rhodococcus, Scenedesmus, Streptomyces, Streptococcus, Synecoccus, Saccharomonospora, Saccharopolyspora, Staphylococcus, Serratia, Salmonella, Shigella, Thermoanaerobacterium, Tropheryma, Tularensis, Temecula, Thermosynechococcus, Thermococcus, Ureaplasma, Xanthomonas, Xylella, Yersinia, and Zymomonas.

[0227] In some embodiments, the bacterial host strain is an industrial strain. Numerous bacterial industrial strains are known and suitable for the methods and compositions described in this application. In some embodiments, the bacterial host cell is of the Agrobacterium species (e.g., A. radiobacter, A. rhizogenes, A. rubi), the Arthrobacterspecies (e.g., A. aurescens, A. citreus, A. globformis, A. hydrocarboglutamicus, A. mysorens, A. nicotianae, A. paraffineus, A. protophonniae, A. roseoparaffinus, A. sulfureus, A. ureafaciens), or the Bacillus species (e.g., B. thuringiensis, B. anthracis, B. megaterium, B. subtilis, B. lentus, B. circulars, B. pumilus, B. lautus, B. coagulans, B. brevis, B. firmus, B. alkaophius, B. licheniformis, B. clausii, B. stearothermophilus, B. halodurans and B. amyloliquefaciens). In particular embodiments, the host cell will be an industrial Bacillus strain including but not limited to B. subtilis, B. pumilus, B. licheniformis, B. megaterium, B. clausii, B. stearothermophilus and B. amyloliquefaciens. In some embodiments, the host cell will be an industrial Clostridium species (e.g., C. acetobutylicum, C. tetani E88, C. lituseburense, C. saccharobutylicum, C. perfringens, C. beijerinckii). In some embodiments, the host cell will be an industrial Corynebacterium species (e.g., C. glutamicum, C. acetoacidophilum). In some embodiments, the host cell will be an industrial Escherichia species (e.g., E. coli). In some embodiments, the host cell will be an industrial Erwinia species (e.g., E. uredovora, E. carotovora, E. ananas, E. herbicola, E. punctata, E. terreus). In some embodiments, the host cell will be an industrial Pantoea species (e.g., P. citrea, P. agglomerans). In some embodiments, the host cell will be an industrial Pseudomonas species, (e.g., P. putida, P. aeruginosa, P. mevalonii). In some embodiments, the host cell will be an industrial Streptococcus species (e.g., S. equisimiles, S. pyogenes, S. uberis). In some embodiments, the host cell will be an industrial Streptomyces species (e.g., S. ambofaciens, S. achromogenes, S. avermitilis, S. coelicolor, S. aureofaciens, S. aureus, S. fungicidicus, S. griseus, S. lividans). In some embodiments, the host cell will be an industrial Zymomonas species (e.g., Z. mobilis, Z. lipolytica), and the like.

[0228] The present disclosure is suitable for use with an E. coli cell. In some embodiments, the E. coli cell is an E. coli BL21(DE3) cell. The present disclosure is suitable for use with a Bacillus cell. The present disclosure is suitable for use with a filamentous fungi cell. The present disclosure is suitable for use with a yeast cell.

[0229] The present disclosure may also be suitable for use with a variety of animal cell types, including mammalian cells, for example, human (including HEK 293, HEK 293T, A549, HepG2, HeLa, WI38, PER.C6 and Bowes melanoma cells), non-human primate (including COS-1, COS-7) mouse (including 3T3, C2C12, ROS 17/2.8 (osteosarcoma cells), NS0, NS1, Sp2/0), hamster (CHO, BHK), monkey (COS, FRhL, Vero), insect cells, for example fall armyworm (including Sf9 and Sf21), silkmoth (including BmN), cabbage looper (including BTI-Tn-5B1-4) and common fruit fly (including Schneider 2), and hybridoma cell lines.

[0230] In various embodiments, strains that may be used in the practice of the disclosure including both prokaryotic and eukaryotic strains, and are readily accessible to the public from a number of culture collections such as American Type Culture Collection (ATCC), Deutsche Sammlung von Mikroorganismen and Zellkulturen GmbH (DSM), Centraalbureau Voor Schimmelcultures (CBS), and Agricultural Research Service Patent Culture Collection, Northern Regional Research Center (NRRL).

[0231] In some embodiments, a host cell produces an OPNA hydrolyzing enzyme, such as a V-agent hydrolyzing enzyme and/or a G-agent hydrolyzing enzyme, including but not limited to an OPNA hydrolyzing enzyme having the sequence of any one of SEQ ID NOs: 1-4 or 6. In some embodiments, a PTE or PTER comprises an amino acid sequence that is at least 90% identical to any one of SEQ ID NOs: 1-4 and 6. In some embodiments, a host cell comprises a polynucleotide encoding an OPNA hydrolyzing enzyme, wherein the polynucleotide comprises the sequence of any one of SEQ ID NOs: 10-13 and 15. In some embodiments, a host cell comprises a polynucleotide encoding a OPNA hydrolyzing enzyme, wherein the polynucleotide comprises a sequence that is at least 90% identical to any one of SEQ ID NOs: 10-13 and 15.

### Culturing of Host Cells

[0232] Any of the cells disclosed in this application can be cultured in media of any type (rich or minimal) and any composition prior to, during, and/or after contact and/or integration of a polynucleotide. The conditions of the culture or culturing process can be optimized through routine experimentation as would be understood by one of ordinary skill in the art. In some embodiments, the selected media is supplemented with various components. In some embodiments, the concentration and amount of a supplemental component is optimized. In some embodiments, other aspects of the media and growth conditions (e.g., pH, temperature, etc.) are optimized through routine experimentation. In some embodiments, the frequency that the media is supplemented with one or more supplemental components, and the amount of time that the cell is cultured, is optimized.

[0233] Culturing of the cells described in this application can be performed in culture vessels known and used in the art. In some embodiments, an aerated reaction vessel (e.g., a stirred tank reactor) is used to culture the cells. In some embodiments, a bioreactor or fermenter is used to culture the cell. Thus, in some embodiments, the cells are used in fermentation. As used in this application, the terms “bioreactor” and “fermenter” are interchangeably used and refer to an enclosure, or partial enclosure, in which a biological, biochemical and/or chemical reaction takes place that involves a living organism or part of a living organism. A “large-scale bioreactor” or “industrial-scale bioreactor” is a bioreactor that is used to generate a product on a commercial or quasi-commercial scale. Large scale bioreactors typically have volumes in the range of liters, hundreds of liters, thousands of liters, or more.

[0234] Non-limiting examples of bioreactors include: stirred tank fermenters, bioreactors agitated by rotating mixing devices, chemostats, bioreactors agitated by shaking devices, airlift fermenters, packed-bed reactors, fixed-bed reactors, fluidized bed bioreactors, bioreactors employing wave induced agitation, centrifugal bioreactors, roller bottles, and hollow fiber bioreactors, roller apparatuses (for example benchtop, cart-mounted, and/or automated varieties), vertically-stacked plates, spinner flasks, stirring or rocking flasks, shaken multi-well plates, MD bottles, T-flasks, Roux bottles, multiple-surface tissue culture propagators, modified fermenters, and coated beads (e.g., beads coated with serum proteins, nitrocellulose, or carboxymethyl cellulose to prevent cell attachment).

[0235] In some embodiments, the bioreactor includes a cell culture system where the cell (e.g., yeast cell) is in contact with moving liquids and/or gas bubbles. In some embodiments, the cell or cell culture is grown in suspension. In other embodiments, the cell or cell culture is attached to a solid phase carrier. Non-limiting examples of a carrier system includes microcarriers (e.g., polymer spheres, microbeads, and microdisks that can be porous or non-porous), cross-linked beads (e.g., dextran) charged with specific chemical groups (e.g., tertiary amine groups), 2D microcarriers including cells trapped in nonporous polymer fibers, 3D carriers (e.g., carrier fibers, hollow fibers, multicartridge reactors, and semi-permeable membranes that can comprising porous fibers), microcarriers having reduced ion exchange capacity, encapsulation cells, capillaries, and aggregates. In some embodiments, carriers are fabricated from materials such as dextran, gelatin, glass, or cellulose.

[0236] In some embodiments, industrial-scale processes are operated in continuous, semi-continuous or non-continuous modes. Non-limiting examples of operation modes are batch, fed batch, extended batch, repetitive batch, draw/fill, rotating-wall, spinning flask, and/or perfusion mode of operation. In some embodiments, a bioreactor allows continuous or semi-continuous replenishment of the substrate stock, for example a carbohydrate source and/or continuous or semi-continuous separation of the product, from the bioreactor.

[0237] In some embodiments, the bioreactor or fermenter includes a sensor and/or a control system to measure and/or adjust reaction parameters. Non-limiting examples of reaction parameters include biological parameters (e.g., growth rate, cell size, cell number, cell density, cell type, or cell state, etc.), chemical parameters (e.g., pH, redox-potential, concentration of reaction substrate and/or product, concentration of dissolved gases, such as oxygen concentration and CO₂ concentration, nutrient concentrations, metabolite concentrations, concentration of an oligopeptide, concentration of an amino acid, concentration of a vitamin, concentration of a hormone, concentration of an additive, serum concentration, ionic strength, concentration of an ion, relative humidity, molarity, osmolarity, concentration of other chemicals, for example buffering agents, adjuvants, or reaction by-products), physical/mechanical parameters (e.g., density, conductivity, degree of agitation, pressure, and flow rate, shear stress, shear rate, viscosity, color, turbidity, light absorption, mixing rate, conversion rate, as well as thermodynamic parameters, such as temperature, light intensity/quality, etc.). Sensors to measure the parameters described in this application are well known to one of ordinary skill in the relevant mechanical and electronic arts. Control systems to adjust the parameters in a bioreactor based on the inputs from a sensor described in this application are well known to one of ordinary skill in the art in bioreactor engineering.

[0238] In some embodiments, the method involves batch fermentation (e.g., shake flask fermentation). General considerations for batch fermentation (e.g., shake flask fermentation) include the level of oxygen and glucose. For example, batch fermentation (e.g., shake flask fermentation) may be oxygen and glucose limited, so in some embodiments, the capability of a strain to perform in a well-designed fed-batch fermentation is underestimated.

[0239] In some embodiments, the cells of the present disclosure are adapted to produce an OPNA hydrolyzing enzyme, such as a V-agent hydrolyzing enzyme and/or a G-agent hydrolyzing enzyme, in vivo. In some embodiments, the cells are adapted to secrete an OPNA hydrolyzing enzyme including a PTE or PTER. In some embodiments, the cells of the present disclosure are lysed, and the remaining lysates are recovered for subsequent use. In some embodiments, any of the methods described in this application may include isolation and/or purification of an OPNA hydrolyzing enzyme. For example, the isolation and/or purification can involve one or more of cell lysis, centrifugation, extraction, column chromatography, distillation, crystallization, and lyophilization.

### Expression of Polynucleotides in Host Cells

[0240] Aspects of the present disclosure relate to recombinant proteins, functional mutants and variants thereof, as well as their uses. For example, the methods described in this application may be used to produce an OPNA hydrolyzing enzyme, such as a V-agent hydrolyzing enzyme and/or a G-agent hydrolyzing enzyme. The methods may comprise using a host cell comprising a protein or peptide disclosed in this application, cell lysate, isolated protein or peptide, or any combination thereof. Methods comprising recombinant expression of genes encoding a protein or peptide disclosed in this application in a host cell are encompassed by the present disclosure.

[0241] Aspects of the disclosure relate to polynucleotides encoding an OPNA hydrolyzing enzyme, such as a V-agent hydrolyzing enzyme and/or a G-agent hydrolyzing enzyme, wherein the polynucleotide comprises the sequence of any one of SEQ ID NOs: 10-13 and 15. Further aspects of the disclosure relate to polynucleotides encoding an OPNA hydrolyzing enzyme, wherein the polynucleotide comprises a sequence that is at least 90% identical to any one of SEQ ID NOs: 10-13 and 15.

[0242] A polynucleotide encoding any of the recombinant polypeptides (e.g., PTE or PTER) described in this application may be incorporated into any appropriate vector through any method known in the art. For example, the vector may be an expression vector, including but not limited to a viral vector (e.g., a lentiviral, retroviral, adenoviral, or adeno-associated viral vector), any vector suitable for transient expression, any vector suitable for constitutive expression, or any vector suitable for inducible expression (e.g., a galactose-inducible or doxycycline-inducible vector).

[0243] A vector encoding any of the recombinant polypeptides (e.g., PTE or PTER) described in this application may be introduced into a suitable host cell using any method known in the art. Non-limiting examples of yeast transformation protocols are described in Gietz et al., Yeast transformation can be conducted by the LiAc/SS Carrier DNA/PEG method. Methods Mol Biol. 2006; 313:107-20, which is hereby incorporated by reference in its entirety. Host cells may be cultured under any conditions suitable as would be understood by one of ordinary skill in the art. For example, any media, temperature, and incubation conditions known in the art may be used. For host cells carrying an inducible vector, cells may be cultured with an appropriate inducible agent to promote expression.

[0244] In some embodiments, a vector replicates autonomously in the cell. In some embodiments, a vector integrates into a chromosome within a cell. A vector can contain one or more endonuclease restriction sites that are cut by a restriction endonuclease to insert and ligate a nucleic acid containing a gene described in this application to produce a recombinant vector that is able to replicate in a cell. Vectors can be composed of DNA or RNA. Cloning vectors include, but are not limited to: plasmids, fosmids, phagemids, virus genomes and artificial chromosomes. As used in this application, the terms “expression vector” or “expression construct” refer to a nucleic acid construct, generated recombinantly or synthetically, with a series of specified nucleic acid elements that permit transcription of a particular nucleic acid in a host cell. In some embodiments, the nucleotide sequence of a gene described in this application is inserted into a cloning vector so that it is operably joined to regulatory sequences and, in some embodiments, expressed as an RNA transcript. In some embodiments, the vector contains one or more markers, such as a selectable marker as described in this application, to identify cells transformed or transfected with the recombinant vector. In some embodiments, a host cell has already been transformed with one or more vectors. In some embodiments, a host cell that has been transformed with one or more vectors is subsequently transformed with one or more vectors. In some embodiments, a host cell is transformed simultaneously with more than one vector. In some embodiments, a cell that has been transformed with a vector or an expression cassette incorporates all or part of the vector or expression cassette into its genome. In some embodiments, the nucleotide sequence of a gene described in this application is codon-optimized. Codon optimization may increase production of the gene product by at least 10%, at least 15%, at least 20%, at least 25%, at least 30%, at least 35%, at least 40%, at least 45%, at least 50%, at least 55%, at least 60%, at least 65%, at least 70%, at least 75%, at least 80%, at least 85%, at least 90%, at least 95%, or 100%, including all values in between) relative to a reference sequence that is not codon-optimized.

[0245] In some embodiments, the polynucleotide encoding any of the proteins described in this application is under the control of regulatory sequences (e.g., enhancer sequences). In some embodiments, a polynucleotide is expressed under the control of a promoter. The promoter can be a native promoter, e.g., the promoter of the gene in its endogenous context, which provides normal regulation of expression of the gene. Alternatively, a promoter can be a promoter that is different from the native promoter of the gene, e.g., the promoter is different from the promoter of the gene in its endogenous context.

[0246] In some embodiments, the promoter is a eukaryotic promoter. Non-limiting examples of eukaryotic promoters include TDH3, PGK1, PKC1, PDC1, TEF1, TEF2, RPL18B, SSA1, TDH2, PYK1, TPI1, GAL1, GAL10, GAL7, GAL3, GAL2, MET3, MET25, HXT3, HXT7, ACT1, ADH1, ADH2, CUP1-1, ENO2, and SOD1, as would be known to one of ordinary skill in the art (see, e.g., Addgene website: blog.addgene.org/plasmids-101-the-promoter-region). In some embodiments, the promoter is a prokaryotic promoter (e.g., bacteriophage or bacterial promoter). Non-limiting examples of bacteriophage promoters include Plsicon, T3, T7, SP6, and PL. Non-limiting examples of bacterial promoters include Pbad, PmgrB, Ptrc2, Plac/ara, Ptac, and Pm.

[0247] In some embodiments, the promoter is an inducible promoter. As used in this application, an “inducible promoter” is a promoter controlled by the presence or absence of a molecule. Non-limiting examples of inducible promoters include chemically regulated promoters and physically regulated promoters. For chemically regulated promoters, the transcriptional activity can be regulated by one or more compounds, such as methanol, alcohol, tetracycline, galactose, a steroid, a metal, an amino acid, or other compounds. For physically regulated promoters, transcriptional activity can be regulated by a phenomenon such as light or temperature. Non-limiting examples of tetracycline-regulated promoters include anhydrotetracycline (aTc)-responsive promoters and other tetracycline-responsive promoter systems (e.g., a tetracycline repressor protein (tetR), a tetracycline operator sequence (tetO) and a tetracycline transactivator fusion protein (tTA)). Non-limiting examples of steroid-regulated promoters include promoters based on the rat glucocorticoid receptor, human estrogen receptor, moth ecdysone receptors, and promoters from the steroid/retinoid/thyroid receptor superfamily. Non-limiting examples of metal-regulated promoters include promoters derived from metallothionein (proteins that bind and sequester metal ions) genes. Non-limiting examples of pathogenesis-regulated promoters include promoters induced by salicylic acid, ethylene or benzothiadiazole (BTH). Non-limiting examples of temperature/heat-inducible promoters include heat shock promoters. Non-limiting examples of light-regulated promoters include light responsive promoters from plant cells. In certain embodiments, the inducible promoter is a galactose-inducible promoter. In some embodiments, the inducible promoter is induced by one or more physiological conditions (e.g., pH, temperature, radiation, osmotic pressure, saline gradients, cell surface binding, or concentration of one or more extrinsic or intrinsic inducing agents). Non-limiting examples of an extrinsic inducer or inducing agent include amino acids and amino acid analogs, saccharides and polysaccharides, nucleic acids, protein transcriptional activators and repressors, cytokines, toxins, petroleum-based compounds, metal containing compounds, salts, ions, enzyme substrate analogs, hormones or any combination.

[0248] In some embodiments, the promoter is a constitutive promoter. As used in this application, a “constitutive promoter” refers to an unregulated promoter that allows continuous transcription of a gene. Non-limiting examples of a constitutive promoter include TDH3, PGK1, PKC1, PDC1, TEF1, TEF2, RPL18B, SSA1, TDH2, PYK1, TPI1, HXT3, HXT7, ACT1, ADH1, ADH2, ENO2, and SOD1. Other inducible promoters or constitutive promoters, including synthetic promoters, that may be known to one of ordinary skill in the art are also contemplated.

[0249] Regulatory sequences needed for gene expression may vary between species or cell types, but generally include, as necessary, 5′-non-transcribed and 5′-non-translated sequences involved with the initiation of transcription and translation respectively, such as a TATA box, capping sequence, CAAT sequence, and the like. In particular, such 5′-non-transcribed regulatory sequences will include a promoter region which includes a promoter sequence for transcriptional control of the operably joined gene. Regulatory sequences may also include enhancer sequences or upstream activator sequences. Vectors may include 5′-leader or signal sequences. The regulatory sequence may also include a terminator sequence. In some embodiments, a terminator sequence marks the end of a gene in DNA during transcription. The choice and design of one or more appropriate vectors suitable for inducing expression of one or more genes described in this application in a heterologous organism is within the ability and discretion of one of ordinary skill in the art. Expression vectors containing the necessary elements for expression are commercially available and known to one of ordinary skill in the art (see, e.g., Sambrook et al., Molecular Cloning: A Laboratory Manual, Fourth Edition, Cold Spring Harbor Laboratory Press, 2012).

[0250] The skilled artisan will also realize that mutations in a recombinant polypeptide (e.g., a PTE or PTER) coding sequence may result in conservative amino acid substitutions to provide functionally equivalent variants of the foregoing polypeptides, e.g., variants that retain the activities of the polypeptides. As used in this application, a “conservative amino acid substitution” refers to an amino acid substitution that does not alter the relative charge or size characteristics or functional activity of the protein in which the amino acid substitution is made.

[0251] In some instances, an amino acid is characterized by its R group (see, e.g., Table 1). For example, an amino acid may comprise a nonpolar aliphatic R group, a positively charged R group, a negatively charged R group, a nonpolar aromatic R group, or a polar uncharged R group. Non-limiting examples of an amino acid comprising a nonpolar aliphatic R group include alanine, glycine, valine, leucine, methionine, and isoleucine. Non-limiting examples of an amino acid comprising a positively charged R group includes lysine, arginine, and histidine. Non-limiting examples of an amino acid comprising a negatively charged R group include aspartate and glutamate. Non-limiting examples of an amino acid comprising a nonpolar, aromatic R group include phenylalanine, tyrosine, and tryptophan. Non-limiting examples of an amino acid comprising a polar uncharged R group include serine, threonine, cysteine, proline, asparagine, and glutamine.

[0252] Non-limiting examples of functionally equivalent variants of polypeptides may include conservative amino acid substitutions in the amino acid sequences of proteins disclosed in this application. Conservative substitutions of amino acids include substitutions made amongst amino acids within the following groups: (a) M, I, L, V; (b) F, Y, W; (c) K, R, H; (d) A, G; (e) S, T; (f) Q, N; and (g) E, D. Additional non-limiting examples of conservative amino acid substitutions are provided in Table 1.

[0253] In some embodiments, 1, 2, 3, 4, 5, 6, 7, 8, 9, 10, 11, 12, 13, 14, 15, 16, 17, 18, 19, 20 or more than 20 residues can be changed when preparing variant polypeptides. In some embodiments, amino acids are replaced by conservative amino acid substitutions. In some embodiments, amino acids are replaced by non-conservative amino acid substitutions.

TABLE 1
Non-limiting Examples of conservative amino acid substitutions

| Original | | Conservative Amino |
|---|---|---|
| Residue | R Group Type | Acid Substitutions |
| Ala (A) | nonpolar aliphatic | Cys, Gly, Ser |
| Arg (R) | positively charged | His, Lys |
| Asn (N) | polar uncharged | Asp, Gln, Glu |
| Asp (D) | negatively charged | Asn, Gln, Glu |
| Cys (C) | polar uncharged | Ala, Ser |
| Gln (Q) | polar uncharged | Asn, Asp, Glu |
| Glu (E) | negatively charged | Asn, Asp, Gln |
| Gly (G) | nonpolar aliphatic | Ala, Ser |
| His (H) | positively charged | Arg, Tyr, Trp |
| Ile (I) | nonpolar aliphatic | Leu, Met, Val |
| Leu (L) | nonpolar aliphatic | Ile, Met, Val |
| Lys (K) | positively charged | Arg, His |
| Met (M) | nonpolar aliphatic | Ile, Leu, Phe, Val |
| Pro (P) | polar uncharged | |
| Phe (F) | nonpolar aromatic | Met, Trp, Tyr |
| Ser (S) | polar uncharged | Ala, Gly, Thr |
| Thr (T) | polar uncharged | Ala, Asn, Ser |
| Trp (W) | nonpolar aromatic | His, Phe, Tyr, Met |
| Tyr (Y) | nonpolar aromatic | His, Phe, Trp |
| Val (V) | nonpolar aliphatic | Ile, Leu, Met, Thr |

[0254] Mutations (e.g., substitutions, insertions, additions, deletions, or truncations) can be made in a nucleotide sequence by a variety of methods known to one of ordinary skill in the art. For example, mutations (e.g., substitutions, insertions, additions, deletions, or truncations) can be made by PCR-directed mutation, site-directed mutagenesis according to the method of Kunkel (Kunkel, Proc. Nat. Acad. Sci. U.S.A. 82: 488-492, 1985), by chemical synthesis of a gene encoding a polypeptide, by gene editing methods, or by insertions, such as insertion of a tag (e.g., a His tag or a GFP tag). Mutations can include, for example, substitutions, insertions, additions, deletions, truncations, and translocations, generated by any method known in the art. Methods for producing mutations may be found in in references such as Molecular Cloning: A Laboratory Manual, J. Sambrook, et al., eds., Fourth Edition, Cold Spring Harbor Laboratory Press, Cold Spring Harbor, New York, 2012, or Current Protocols in Molecular Biology, F. M. Ausubel, et al., eds., John Wiley & Sons, Inc., New York, 2010.

[0255] It is believed that one skilled in the art can, based on the above description, utilize the present invention to its fullest extent. The following specific embodiments are, therefore, to be construed as merely illustrative, and not limitative of the remainder of the disclosure in any way whatsoever. All publications cited in the present application are incorporated by reference for the purposes or subject matter referenced in this disclosure.

### EXAMPLES

[0256] In order that the invention described in the present application may be more fully understood, the following examples are set forth. The examples described in this application are offered to illustrate the systems and methods provided in this disclosure and are not to be construed in any way as limiting their scope.

### Example 1: Identification of OPNA Hydrolyzing Enzymes that Hydrolyze VX and/or VR Nerve Agents

[0257] To identify OPNA hydrolyzing enzymes that can hydrolyze VX and/or VR, a library of candidate PTEs was designed from sequences in metagenomic databases with similarity to PTE from B. dininuta (SEQ ID NO: 18, which corresponds to the amino acid sequence of UniprotKB Accession No. POA434).

[0258] Each candidate enzyme sequence was tagged with a C-terminal StrepII affinity tag and flexible linker to enable purification. Nucleotide sequences were recoded for expression in E. coli and synthesized in the replicative expression vector shown in FIG. 1. Each candidate enzyme expression construct was transformed into an E. coli B3L21(DE3) strain. Strain t339870, expressing a StrepII-tagged fluorescent (GFP) protein (SEQ ID NO: 20), was included in the library screen as a negative control for enzyme activity. Strain t401992, expressing a StrepII-tagged PTE from B. diminuta (SEQ ID NO: 7, which corresponds to the amino acid sequence of UniprotKB Accession No. P0A434, except that the signal sequence was removed and a methionine residue was added at the N-terminus), was included in the library as a positive control and was used to establish hit ranking. Strain t402006, expressing the B. diminuta PTE variant G1-C74 (SEQ ID NO: 5) was also used as a positive control.

[0259] VX and YR hydrolysis activity of purified PTEs (prepared and stored in a PTE-specific buffer containing 100 mM HEPES, pH 8.0, 150 mMk NaCl, 50 mM biotin, 0.1 mM CoCl₂, 10% glycerol) was measured by monitoring thiol release using 5,5′-dithiobis(2-nitro-benzoic acid) (DTNB; aka Ellman's reagent). The assay was conducted in 96-well, clear-bottom microplates. Enzyme samples were prepared by mixing 25 μl of each purified enzyme (64-4900 ng/pi) with 45 μl of DTNB reagent solution (50 mM HEPES, pH 7.6, 137 mM NaCl, 2.7 mM KCl, 8 mM DTNB, 1 mM CoCl). The assay was initiated with 50 μl of VX or VR racemates (3 mM). The final volume for each reaction was 120 μl. Hydrolysis of VX and VR (corresponding to the increase in Ellman's chromophore concentration) was monitored at A412 (ε=13600 M−1 cm⁻¹) for 10 minutes at room temperature. Kinetic parameters were calculated as mOD412 min⁻¹ mg⁻¹.

[0260] Representative PTEs were tested for their stability and showed no statistically significant loss of activity over 23 hours of sample time. Purification and cryopreservation conditions (flash freeze, flash freeze+50 mM trehalose, and no treatment) were determined on a representative set of PTEs and showed that all cryopreservation conditions resulted in similar enzyme activity. (FIG. 2). Metals and elution buffer were added in the PTE (“TRUE” group) for testing their activity. FIG. 2 shows that addition of metals in the purification and elution buffers helped increase activity of the enzymes.

[0261] The activity of candidate PTEs on VX and VR was examined. As shown in FIG. 3A, several library PTEs (expressed by strains t402353, t402181, t401393, and t402076) were identified for which each replicate produced detectable amounts of VX and/or VR hydrolytic activity, including >10% of the average VR hydrolytic rate of positive control t401992 on VR (FIG. 3A; Table 2). While the positive control PTE from B. dininuia (SEQ ID NO: 7) expressed by strain t401992 was only active against VR, strains t402353, t402181, t401393, and t402076 were surprisingly found to be active against both VX and VR. Table 2 shows the quantity, purity, and the activity against VX and VR of these candidate PTEs.

[0262] To confirm the activity of the candidate PTEs identified in the primary screen, a secondary screen was performed. The experimental protocol for the secondary screen was the same as the primary screen, except that three replicates per strain were tested. The overall trends in VX and VR hydrolytic activity by strains t402353, t402181, t401393, and t402076 observed in the primary screen were also observed in the secondary screen (FIG. 3B; Table 3).

[0263] Sequences for PTEs described in Example 1, including candidate PTEs for which data are provided in FIGS. 3A and 3B are provided in Table 5.

TABLE 2
Results of Primary Screen

| | Primary Screen Data | | | | |
|---|---|---|---|---|---|
| | | | | VR activity | VX activity |
| | | Quantity | Purity | (mOD412 min⁻¹ | (mOD412 min⁻¹ |
| Strain | Replicate | (μg) | (%) | μg⁻¹) | μg⁻¹) |
| t402353 | 1 | 71.1 | 97.1 | 0.68 | 0.87 |
| | 2 | 74.0 | 94.9 | 0.71 | 0.85 |
| t402181 | 1 | 29.0 | 68.0 | 2.20 | 2.30 |
| | 2 | 23.3 | 100 | 1.50 | 1.60 |
| t401393 | 1 | 50.7 | 99.3 | 0.47 | 1.54 |
| | 2 | 43.1 | 96.4 | 0.32 | 1.03 |
| t402076 | 1 | 40.3 | 79.4 | 1.61 | 1.66 |
| | 2 | 41.6 | 79.6 | 1.25 | 1.52 |
| t402287 | 1 | 60.1 | 94.9 | 0.51 | 0.51 |
| | 2 | 72.5 | 97.1 | 0.39 | 0.48 |
| t402121 | 1 | 23.3 | 100 | 0.80 | 0 |
| | 2 | 21.3 | 100 | 0.68 | 0 |
| t401421 | 1 | 32.6 | 100 | 0 | 0.28 |
| | 2 | 67.9 | 95.8 | 0 | 0.26 |
| t401451 | 1 | 107 | 99.6 | 0.06 | 0.31 |
| | 2 | 79.7 | 99.5 | 0 | 0.25 |
| t402024 | 1 | 9.9 | 95.0 | 0 | 1.34 |
| | 2 | 11.5 | 94.0 | 0 | 1.08 |
| t402094 | 1 | 584 | 98.6 | 0.09 | 0.25 |
| | 2 | 449 | 98.9 | 0.08 | 0.23 |
| t402397 | 1 | 88.3 | 97.0 | 0 | 0.2 |
| | 2 | 83.8 | 96.7 | 0 | 0.2 |
| t401992 | 1 | 7.7 | 59.0 | 2.08 | 0 |
| (Positive | 2 | 13.0 | 54.9 | 1.61 | 0 |
| Control) | | | | | |
| t402006 | 1 | 41.0 | 92.3 | 5.47 | 2.50 |
| (Positive | 2 | 49.6 | 90.3 | 4.04 | 2.05 |
| Control) | | | | | |
| t339870 | Average of 34 | 104.5 (59.7) | 81.9 (38.4) | 0 | 0 |
| (Negative | reps | | | | |
| Control) | | | | | |

TABLE 3
Results of Secondary Screen

| | Secondary Screen Data | | | |
|---|---|---|---|---|
| | | | VR activity*^{‡} | VX activity*^{‡} |
| | | | (mOD412 | (mOD412 |
| | Quantity*^{†} | Purity*^{†} | min⁻¹ | min⁻¹ |
| Strain | (μg) | (%) | μg⁻¹) | μg⁻¹) |
| t402353 | 70.8 | 99.98 | 1.53 | 1.87 |
| | (12) | (0.08) | (0.14) | (0.11) |
| t402181 | 38.4 | 100.00 | 1.16 | 1.22 |
| | (7.2) | (0.00) | (0.51) | (0.54) |
| t401393 | 121.2 | 99.70 | 0.81 | 2.33 |
| | (21.6) | (0.24) | (0.02) | (0.03) |
| t402076 | 31.2 | 99.69 | 2.67 | 3.56 |
| | (8.4) | (0.52) | (0.67) | (1.24) |
| t402006 | 62.4 | 95.45 | 7.71 | 3.48 |
| (Positive | (9.6) | (0.83) | (0.46) | (0.13) |
| Control) | | | | |
| t339870 | 33.6 | 98.82 | 0.03 | 0 |
| (Negative | (6) | (0.30) | (0.03) | |
| Control) | | | | |

*Reported as AVG (S.D.); For “Quantity” and “Purity” measurements, samples with no detectable protein were omitted from calculations. For t401393, 20 of 24 replicate samples had detectable protein. For t402181, 23 of 24 replicate had detectable protein. For all other enzymes and controls, all samples yielded protein.
^{†}Average of 24 replicates
^{‡}Average of 3 replicates

[0264] Table 4 shows sequence identity of candidate PTEs identified in the primary screen relative to the previously-described IVI-13 PTE variant (Goldsmith et al. (2015) Arch Toxicol 90 (11): 2711-2724. All of the candidate PTEs identified had low (33-34%) identity to the IVH3 PTE variant.

TABLE 4
Sequence Identity Matrix for Enzymes Identified
in Primary Screen (% identity)

| % Identity | t402353 | t402076 | t401393 | t402181 | IVH3 |
|---|---|---|---|---|---|
| t402353 | | 94 | 87 | 92 | 33 |
| (SEQ ID | | | | | |
| NO: 4) | | | | | |
| t402076 | 94 | | 87 | 91 | 33 |
| (SEQ ID | | | | | |
| NO: 3) | | | | | |
| t401393 | 87 | 87 | | 90 | 34 |
| (SEQ ID | | | | | |
| NO: 2) | | | | | |
| t402181 | 92 | 91 | 90 | | 34 |
| (SEQ ID | | | | | |
| NO: 1) | | | | | |
| IVH3 (SEQ | 33 | 33 | 34 | 34 | |
| ID NO: 8) | | | | | |

TABLE 5
Sequences of Candidate PTEs and PTERs described in Example 1

| | | PTE or | PTE or |
|---|---|---|---|
| | | PTER Amino | PTER |
| | Source organism of PTE or | Acid SEQ | Nucleotide |
| Strain ID | PTER | ID NO | SEQ ID NO |
| t402181 | Mycobacterium sp. 852014- | 1 | 10 |
| | 52450_SCH5900713 | | |
| t401393 | Mycobacterium colombiense | 2 | 11 |
| t402076 | Mycobacterium asiaticum | 3 | 12 |
| t402353 | Mycobacterium gordonae | 4 | 13 |
| t402006 | B. diminuta (variant G1-C74) | 5 | 14 |
| t401609 | Prosthecomicrobium hirschii | 6 | 15 |
| t401992 | Brevundimonas diminuta | 7 | 16 |
| N/A | Brevundimonas diminuta | 8 | |
| | (IVH3) | | |
| N/A | Homo sapiens (PTER) | 9 | 17 |
| N/A | Brevundimonas diminuta | 18 | 19 |
| | (UniProt No. P0A434) | | |
| t339870 | N/A | N/A | N/A |
| (negative | | | |
| control) | | | |
| t402287 | Mycobacterium kansasii 824 | 22 | 23 |
| t402121 | Desulfatibacillum | 24 | 25 |
| | alkenivorans DSM 16219 | | |
| t401421 | Rhizobiaceae bacterium | 26 | 27 |
| t401451 | Providencia heimbachae | 28 | 29 |
| | ATCC 35613 | | |
| t402024 | Pricia antarctica | 30 | 31 |
| t402094 | Proteus mirabilis | 32 | 33 |
| t402397 | Salmonella enterica subsp. | 34 | 35 |
| | enterica serovar Give str. S5- | | |
| | 487 | | |

### Example 2: Enzyme Engineering

[0265] Four PTEs and one PIER identified in Example 1 (expressed in strains t402353 (SEQ ID NO: 4), t402181 (SEQ ID NO: 1), t401393 (SEQ ID NO: 2), t402076 (SEQ ID NO: 3) and t401609 (SEQ ID NO: 6)) were selected as templates for engineering to increase activity against V-agents. Approximately 2,053 rationally engineered enzymes were created. The screening included the generation of two libraries for enzyme engineering.

[0266] The first library (“PTE library”) was created using PTEs identified in Example 1, which were expressed in strains t402353 (SEQ ID NO: 4), t402181 (SEQ ID NO: 1), t401393 (SEQ ID NO: 2), and t402076 (SEQ ID NO: 3).

[0267] SEQ ID NOs: 1-4 were used as templates for enzyme engineering in which active site mutations, mutations at residues distal to the active site, and combinations thereof were created. More specifically, amino acid substitutions were generated at or near the active site, at residues throughout the protein structure (e.g., distal residues), and at a broader constellation of amino acid residues around the active site. The resulting PTE library was screened for increased activity against VX and VR.

[0268] The second library (“PTER library”) was created using a PTER identified in Example 1. The PTER expressed in strain t401609 (SEQ ID NO: 6) was used as a template to engineer and screen for increased activity against VX and VR.

[0269] The following table summarizes the PTE and PTER templates used and the number of engineered enzymes obtained and screened for VX and VR activities in the libraries generated.

TABLE 6
Enzymes Engineered & Screened for each Enzyme Template

| | | Number of Enzymes |
|---|---|---|
| Library | Enzyme Template | Engineered & Screened |
| PTE | t402181 (SEQ ID NO: 1) | 355 |
| PTE | t401393 (SEQ ID NO: 2) | 434 |
| PTE | t402076 (SEQ ID NO: 3) | 405 |
| PTE | t402353 (SEQ ID NO: 4) | 422 |
| PTER | t401609 (SEQ ID NO: 6) | 437 |

[0270] The following table provides the VX and VR activities of each engineered enzyme obtained by mutating one of the five PTE or PTER templates identified in Table 6, the point mutation in each engineered enzyme relative to the enzyme template, and the source organism of each enzyme template.

TABLE 7
Point Mutations of the PTEs and PTERs

| | | | | PTE or | | |
|---|---|---|---|---|---|---|
| | | Template | Mutation | PTER | | |
| Strain | Source organism of | SEQ ID | (relative to | SEQ ID | VX | VR |
| ID | template PTE or PTER | NO: | Template) | NO: | Activity | Activity |
| t815701 | Mycobacterium sp. 852014- | 1 | H22S | 36 | − | − |
| | 52450_SCH5900713 | | | | | |
| t815697 | Mycobacterium sp. 852014- | 1 | H22T | 37 | − | − |
| | 52450_SCH5900713 | | | | | |
| t808998 | Mycobacterium sp. 852014- | 1 | E23D | 38 | − | − |
| | 52450_SCH5900713 | | | | | |
| t810722 | Mycobacterium sp. 852014- | 1 | H24N | 39 | − | − |
| | 52450_SCH5900713 | | | | | |
| t809489 | Mycobacterium sp. 852014- | 1 | V25I | 40 | − | + |
| | 52450_SCH5900713 | | | | | |
| t815553 | Mycobacterium sp. 852014- | 1 | V25M | 41 | + | + |
| | 52450_SCH5900713 | | | | | |
| t809589 | Mycobacterium sp. 852014- | 1 | I27C | 42 | + | − |
| | 52450_SCH5900713 | | | | | |
| t815653 | Mycobacterium sp. 852014- | 1 | I27D | 43 | − | − |
| | 52450_SCH5900713 | | | | | |
| t809899 | Mycobacterium sp. 852014- | 1 | I27E | 44 | − | − |
| | 52450_SCH5900713 | | | | | |
| t809726 | Mycobacterium sp. 852014- | 1 | I27F | 45 | + | + |
| | 52450_SCH5900713 | | | | | |
| t809143 | Mycobacterium sp. 852014- | 1 | I27H | 46 | − | − |
| | 52450_SCH5900713 | | | | | |
| t809274 | Mycobacterium sp. 852014- | 1 | I27K | 47 | − | − |
| | 52450_SCH5900713 | | | | | |
| t810592 | Mycobacterium sp. 852014- | 1 | I27M | 48 | + | + |
| | 52450_SCH5900713 | | | | | |
| t809768 | Mycobacterium sp. 852014- | 1 | I27N | 49 | − | − |
| | 52450_SCH5900713 | | | | | |
| t809763 | Mycobacterium sp. 852014- | 1 | I27P | 50 | − | − |
| | 52450_SCH5900713 | | | | | |
| t810146 | Mycobacterium sp. 852014- | 1 | I27Q | 51 | + | − |
| | 52450_SCH5900713 | | | | | |
| t809437 | Mycobacterium sp. 852014- | 1 | I27R | 52 | − | − |
| | 52450_SCH5900713 | | | | | |
| t809236 | Mycobacterium sp. 852014- | 1 | I27T | 53 | + | + |
| | 52450_SCH5900713 | | | | | |
| t809422 | Mycobacterium sp. 852014- | 1 | I27W | 54 | − | + |
| | 52450_SCH5900713 | | | | | |
| t810109 | Mycobacterium sp. 852014- | 1 | I27Y | 55 | + | − |
| | 52450_SCH5900713 | | | | | |
| 1810457 | Mycobacterium sp. 852014- | 1 | V66I | 56 | + | + |
| | 52450_SCH5900713 | | | | | |
| t810104 | Mycobacterium sp. 852014- | 1 | L68A | 57 | + | − |
| | 52450_SCH5900713 | | | | | |
| t815549 | Mycobacterium sp. 852014- | 1 | L68C | 58 | + | + |
| | 52450_SCH5900713 | | | | | |
| t809678 | Mycobacterium sp. 852014- | 1 | L68M | 59 | + | + |
| | 52450_SCH5900713 | | | | | |
| t809453 | Mycobacterium sp. 852014- | 1 | L68N | 60 | + | + |
| | 52450_SCH5900713 | | | | | |
| t810140 | Mycobacterium sp. 852014- | 1 | L68Q | 61 | − | − |
| | 52450_SCH5900713 | | | | | |
| t809665 | Mycobacterium sp. 852014- | 1 | T69Q | 62 | − | − |
| | 52450_SCH5900713 | | | | | |
| t810417 | Mycobacterium sp. 852014- | 1 | T69S | 63 | + | + |
| | 52450_SCH5900713 | | | | | |
| t809186 | Mycobacterium sp. 852014- | 1 | V70C | 64 | + | + |
| | 52450_SCH5900713 | | | | | |
| t808987 | Mycobacterium sp. 852014- | 1 | V70P | 65 | + | + |
| | 52450_SCH5900713 | | | | | |
| t809003 | Mycobacterium sp. 852014- | 1 | V70T | 66 | + | + |
| | 52450_SCH5900713 | | | | | |
| t809611 | Mycobacterium sp. 852014- | 1 | L73C | 67 | − | − |
| | 52450_SCH5900713 | | | | | |
| t809144 | Mycobacterium sp. 852014- | 1 | L73H | 68 | − | − |
| | 52450_SCH5900713 | | | | | |
| t808376 | Mycobacterium sp. 852014- | 1 | L73M | 69 | − | − |
| | 52450_SCH5900713 | | | | | |
| t815714 | Mycobacterium sp. 852014- | 1 | Y98F | 70 | − | − |
| | 52450_SCH5900713 | | | | | |
| t815674 | Mycobacterium sp. 852014- | 1 | Y98H | 71 | − | − |
| | 52450_SCH5900713 | | | | | |
| t810561 | Mycobacterium sp. 852014- | 1 | Y98W | 72 | − | − |
| | 52450_SCH5900713 | | | | | |
| t808454 | Mycobacterium sp. 852014- | 1 | L144I | 73 | + | + |
| | 52450_SCH5900713 | | | | | |
| t815547 | Mycobacterium sp. 852014- | 1 | K145C | 74 | − | − |
| | 52450_SCH5900713 | | | | | |
| t810029 | Mycobacterium sp. 852014- | 1 | K145E | 75 | − | − |
| | 52450_SCH5900713 | | | | | |
| t809984 | Mycobacterium sp. 852014- | 1 | K145R | 76 | − | + |
| | 52450_SCH5900713 | | | | | |
| t810407 | Mycobacterium sp. 852014- | 1 | K145S | 77 | − | − |
| | 52450_SCH5900713 | | | | | |
| t810694 | Mycobacterium sp. 852014- | 1 | C146F | 78 | − | − |
| | 52450_SCH5900713 | | | | | |
| t809999 | Mycobacterium sp. 852014- | 1 | A147F | 79 | + | + |
| | 52450_SCH5900713 | | | | | |
| t809221 | Mycobacterium sp. 852014- | 1 | A147G | 80 | + | + |
| | 52450_SCH5900713 | | | | | |
| t810241 | Mycobacterium sp. 852014- | 1 | T148C | 81 | + | + |
| | 52450_SCH5900713 | | | | | |
| t809389 | Mycobacterium sp. 852014- | 1 | T148M | 82 | + | + |
| | 52450_SCH5900713 | | | | | |
| t809523 | Mycobacterium sp. 852014- | 1 | T148V | 83 | + | + |
| | 52450_SCH5900713 | | | | | |
| t810462 | Mycobacterium sp. 852014- | 1 | V164I | 84 | + | + |
| | 52450_SCH5900713 | | | | | |
| t810059 | Mycobacterium sp. 852014- | 1 | S176C | 85 | + | + |
| | 52450_SCH5900713 | | | | | |
| t810245 | Mycobacterium sp. 852014- | 1 | S176F | 86 | + | − |
| | 52450_SCH5900713 | | | | | |
| t808431 | Mycobacterium sp. 852014- | 1 | S176H | 87 | − | + |
| | 52450_SCH5900713 | | | | | |
| t809325 | Mycobacterium sp. 852014- | 1 | S176I | 88 | + | + |
| | 52450_SCH5900713 | | | | | |
| t810123 | Mycobacterium sp. 852014- | 1 | S176M | 89 | + | + |
| | 52450_SCH5900713 | | | | | |
| t808423 | Mycobacterium sp. 852014- | 1 | S176T | 90 | + | + |
| | 52450_SCH5900713 | | | | | |
| t810584 | Mycobacterium sp. 852014- | 1 | S176V | 91 | + | + |
| | 52450_SCH5900713 | | | | | |
| t809985 | Mycobacterium sp. 852014- | 1 | S176W | 92 | − | − |
| | 52450_SCH5900713 | | | | | |
| t808372 | Mycobacterium sp. 852014- | 1 | S176Y | 93 | + | + |
| | 52450_SCH5900713 | | | | | |
| t810576 | Mycobacterium sp. 852014- | 1 | T177C | 94 | + | + |
| | 52450_SCH5900713 | | | | | |
| t810329 | Mycobacterium sp. 852014- | 1 | T177L | 95 | + | − |
| | 52450_SCH5900713 | | | | | |
| t809702 | Mycobacterium sp. 852014- | 1 | T177V | 96 | − | − |
| | 52450_SCH5900713 | | | | | |
| t809917 | Mycobacterium sp. 852014- | 1 | H178A | 97 | − | − |
| | 52450_SCH5900713 | | | | | |
| t809622 | Mycobacterium sp. 852014- | 1 | H178S | 98 | − | − |
| | 52450_SCH5900713 | | | | | |
| t810350 | Mycobacterium sp. 852014- | 1 | H178T | 99 | − | − |
| | 52450_SCH5900713 | | | | | |
| t809244 | Mycobacterium sp. 852014- | 1 | T179C | 100 | + | + |
| | 52450_SCH5900713 | | | | | |
| t815702 | Mycobacterium sp. 852014- | 1 | T179E | 101 | + | − |
| | 52450_SCH5900713 | | | | | |
| t809750 | Mycobacterium sp. 852014- | 1 | T179S | 102 | + | + |
| | 52450_SCH5900713 | | | | | |
| t809908 | Mycobacterium sp. 852014- | 1 | T179V | 103 | − | − |
| | 52450_SCH5900713 | | | | | |
| t815687 | Mycobacterium sp. 852014- | 1 | A181C | 104 | + | + |
| | 52450_SCH5900713 | | | | | |
| t810201 | Mycobacterium sp. 852014- | 1 | A181H | 105 | − | − |
| | 52450_SCH5900713 | | | | | |
| t809507 | Mycobacterium sp. 852014- | 1 | A181P | 106 | + | + |
| | 52450_SCH5900713 | | | | | |
| t810151 | Mycobacterium sp. 852014- | 1 | A181S | 107 | + | − |
| | 52450_SCH5900713 | | | | | |
| t810498 | Mycobacterium sp. 852014- | 1 | G206A | 108 | − | − |
| | 52450_SCH5900713 | | | | | |
| t810248 | Mycobacterium sp. 852014- | 1 | G206M | 109 | − | − |
| | 52450_SCH5900713 | | | | | |
| t815564 | Mycobacterium sp. 852014- | 1 | G206S | 110 | − | − |
| | 52450_SCH5900713 | | | | | |
| t827637 | Mycobacterium sp. 852014- | 1 | S208A | 111 | + | + |
| | 52450_SCH5900713 | | | | | |
| t809994 | Mycobacterium sp. 852014- | 1 | S208C | 112 | − | − |
| | 52450_SCH5900713 | | | | | |
| t815617 | Mycobacterium sp. 852014- | 1 | S208Q | 113 | − | − |
| | 52450_SCH5900713 | | | | | |
| t815710 | Mycobacterium sp. 852014- | 1 | S208T | 114 | + | + |
| | 52450_SCH5900713 | | | | | |
| t809819 | Mycobacterium sp. 852014- | 1 | G209N | 115 | + | − |
| | 52450_SCH5900713 | | | | | |
| 809328 | Mycobacterium sp. 852014- | 1 | D210E | 116 | − | − |
| | 52450_SCH5900713 | | | | | |
| t809745 | Mycobacterium sp. 852014- | 1 | D210S | 117 | − | − |
| | 52450_SCH5900713 | | | | | |
| t809592 | Mycobacterium sp. 852014- | 1 | D210T | 118 | − | − |
| | 52450_SCH5900713 | | | | | |
| t808958 | Mycobacterium sp. 852014- | 1 | G228A | 119 | − | − |
| | 52450_SCH5900713 | | | | | |
| t809482 | Mycobacterium sp. 852014- | 1 | G228E | 120 | − | − |
| | 52450_SCH5900713 | | | | | |
| t809892 | Mycobacterium sp. 852014- | 1 | G228H | 121 | − | − |
| | 52450_SCH5900713 | | | | | |
| t809646 | Mycobacterium sp. 852014- | 1 | G228S | 122 | + | + |
| | 52450_SCH5900713 | | | | | |
| t810244 | Mycobacterium sp. 852014- | 1 | D230P | 123 | − | − |
| | 52450_SCH5900713 | | | | | |
| t809406 | Mycobacterium sp. 852014- | 1 | R231G | 124 | − | − |
| | 52450_SCH5900713 | | | | | |
| t809666 | Mycobacterium sp. 852014- | 1 | R231H | 125 | − | − |
| | 52450_SCH5900713 | | | | | |
| t809190 | Mycobacterium sp. 852014- | 1 | R231L | 126 | − | − |
| | 52450_SCH5900713 | | | | | |
| t809840 | Mycobacterium sp. 852014- | 1 | R231M | 127 | − | − |
| | 52450_SCH5900713 | | | | | |
| t810312 | Mycobacterium sp. 852014- | 1 | R231Q | 128 | − | − |
| | 52450_SCH5900713 | | | | | |
| t809715 | Mycobacterium sp. 852014- | 1 | R231T | 129 | − | − |
| | 52450_SCH5900713 | | | | | |
| t809725 | Mycobacterium sp. 852014- | 1 | R231W | 130 | − | − |
| | 52450_SCH5900713 | | | | | |
| t810370 | Mycobacterium sp. 852014- | 1 | S262C | 131 | − | − |
| | 52450_SCH5900713 | | | | | |
| t810172 | Mycobacterium sp. 852014- | 1 | H263C | 132 | + | + |
| | 52450_SCH5900713 | | | | | |
| t810546 | Mycobacterium sp. 852014- | 1 | H263F | 133 | − | − |
| | 52450_SCH5900713 | | | | | |
| t815676 | Mycobacterium sp. 852014- | 1 | H263M | 134 | + | + |
| | 52450_SCH5900713 | | | | | |
| t809447 | Mycobacterium sp. 852014- | 1 | H263N | 135 | + | + |
| | 52450_SCH5900713 | | | | | |
| t809354 | Mycobacterium sp. 852014- | 1 | H263S | 136 | + | + |
| | 52450_SCH5900713 | | | | | |
| t810220 | Mycobacterium sp. 852014- | 1 | H263T | 137 | + | + |
| | 52450_SCH5900713 | | | | | |
| t810126 | Mycobacterium sp. 852014- | 1 | D264N | 138 | − | − |
| | 52450_SCH5900713 | | | | | |
| t809771 | Mycobacterium sp. 852014- | 1 | D264P | 139 | − | − |
| | 52450_SCH5900713 | | | | | |
| t810280 | Mycobacterium sp. 852014- | 1 | D264S | 140 | − | − |
| | 52450_SCH5900713 | | | | | |
| t809652 | Mycobacterium sp. 852014- | 1 | A265C | 141 | + | + |
| | 52450_SCH5900713 | | | | | |
| t809524 | Mycobacterium sp. 852014- | 1 | A265F | 142 | + | ++ |
| | 52450_SCH5900713 | | | | | |
| t809968 | Mycobacterium sp. 852014- | 1 | A265L | 143 | − | − |
| | 52450_SCH5900713 | | | | | |
| t809930 | Mycobacterium sp. 852014- | 1 | A265M | 144 | + | ++ |
| | 52450_SCH5900713 | | | | | |
| t810397 | Mycobacterium sp. 852014- | 1 | A265T | 145 | + | + |
| | 52450_SCH5900713 | | | | | |
| t809365 | Mycobacterium sp. 852014- | 1 | A265W | 146 | + | ++ |
| | 52450_SCH5900713 | | | | | |
| t810027 | Mycobacterium sp. 852014- | 1 | A265Y | 147 | + | ++ |
| | 52450_SCH5900713 | | | | | |
| t810150 | Mycobacterium sp. 852014- | 1 | N266A | 148 | + | ++ |
| | 52450_SCH5900713 | | | | | |
| t810304 | Mycobacterium sp. 852014- | 1 | N266G | 149 | ++ | ++ |
| | 52450_SCH5900713 | | | | | |
| t810152 | Mycobacterium sp. 852014- | 1 | N266M | 150 | ++ | ++ |
| | 52450_SCH5900713 | | | | | |
| t810211 | Mycobacterium sp. 852014- | 1 | N266S | 151 | + | + |
| | 52450_SCH5900713 | | | | | |
| t810436 | Mycobacterium sp. 852014- | 1 | N266T | 152 | ++ | ++ |
| | 52450_SCH5900713 | | | | | |
| t810063 | Mycobacterium sp. 852014- | 1 | N266W | 153 | + | − |
| | 52450_SCH5900713 | | | | | |
| t809175 | Mycobacterium sp. 852014- | 1 | C267A | 154 | + | + |
| | 52450_SCH5900713 | | | | | |
| t809459 | Mycobacterium sp. 852014- | 1 | C267T | 155 | + | + |
| | 52450_SCH5900713 | | | | | |
| t810455 | Mycobacterium sp. 852014- | 1 | C267W | 156 | + | ++ |
| | 52450_SCH5900713 | | | | | |
| t809976 | Mycobacterium sp. 852014- | 1 | W284C | 157 | + | ++ |
| | 52450_SCH5900713 | | | | | |
| t810677 | Mycobacterium sp. 852014- | 1 | W284D | 158 | + | + |
| | 52450_SCH5900713 | | | | | |
| t809638 | Mycobacterium sp. 852014- | 1 | W284F | 159 | + | ++ |
| | 52450_SCH5900713 | | | | | |
| t810083 | Mycobacterium sp. 852014- | 1 | W284H | 160 | + | ++ |
| | 52450_SCH5900713 | | | | | |
| t809820 | Mycobacterium sp. 852014- | 1 | W284I | 161 | − | − |
| | 52450_SCH5900713 | | | | | |
| t810651 | Mycobacterium sp. 852014- | 1 | W284K | 162 | − | − |
| | 52450_SCH5900713 | | | | | |
| t809778 | Mycobacterium sp. 852014- | 1 | W284N | 163 | + | ++ |
| | 52450_SCH5900713 | | | | | |
| t810001 | Mycobacterium sp. 852014- | 1 | W284P | 164 | − | − |
| | 52450_SCH5900713 | | | | | |
| t809423 | Mycobacterium sp. 852014- | 1 | W284Q | 165 | − | − |
| | 52450_SCH5900713 | | | | | |
| t810168 | Mycobacterium sp. 852014- | 1 | W284R | 166 | − | − |
| | 52450_SCH5900713 | | | | | |
| t809282 | Mycobacterium sp. 852014- | 1 | W284Y | 167 | + | ++ |
| | 52450_SCH5900713 | | | | | |
| t810643 | Mycobacterium sp. 852014- | 1 | Y286M | 168 | + | + |
| | 52450_SCH5900713 | | | | | |
| t809673 | Mycobacterium sp. 852014- | 1 | Y286W | 169 | + | + |
| | 52450_SCH5900713 | | | | | |
| t810593 | Mycobacterium colombiense | 2 | S2A | 170 | + | + |
| t809215 | Mycobacterium colombiense | 2 | S2K | 171 | + | + |
| t809576 | Mycobacterium colombiense | 2 | S2T | 172 | + | + |
| t810372 | Mycobacterium colombiense | 2 | E3K | 173 | + | + |
| t809716 | Mycobacterium colombiense | 2 | E3Q | 174 | + | + |
| t810634 | Mycobacterium colombiense | 2 | E3T | 175 | + | + |
| t815609 | Mycobacterium colombiense | 2 | L4I | 176 | + | + |
| t810601 | Mycobacterium colombiense | 2 | L4V | 177 | + | + |
| t809997 | Mycobacterium colombiense | 2 | N5M | 178 | ++ | + |
| t808393 | Mycobacterium colombiense | 2 | N5Q | 179 | + | + |
| t810725 | Mycobacterium colombiense | 2 | N5R | 180 | + | + |
| t809630 | Mycobacterium colombiense | 2 | R8C | 181 | + | + |
| t809755 | Mycobacterium colombiense | 2 | R8L | 182 | + | + |
| t809803 | Mycobacterium colombiense | 2 | R8T | 183 | + | + |
| t810636 | Mycobacterium colombiense | 2 | S10P | 184 | + | + |
| t810494 | Mycobacterium colombiense | 2 | D12E | 185 | + | + |
| t815586 | Mycobacterium colombiense | 2 | D12P | 186 | + | + |
| t810625 | Mycobacterium colombiense | 2 | T13A | 187 | ++ | + |
| 1810518 | Mycobacterium colombiense | 2 | T13P | 188 | + | + |
| t810079 | Mycobacterium colombiense | 2 | A14D | 189 | + | + |
| t810330 | Mycobacterium colombiense | 2 | A14E | 190 | + | + |
| t809945 | Mycobacterium colombiense | 2 | A14S | 191 | + | + |
| t809883 | Mycobacterium colombiense | 2 | A15D | 192 | + | + |
| t809514 | Mycobacterium colombiense | 2 | A15E | 193 | ++ | + |
| t809260 | Mycobacterium colombiense | 2 | A15Q | 194 | + | + |
| t809657 | Mycobacterium colombiense | 2 | L16M | 195 | ++ | + |
| t809539 | Mycobacterium colombiense | 2 | V18I | 196 | ++ | + |
| t810317 | Mycobacterium colombiense | 2 | V18M | 197 | + | + |
| t809485 | Mycobacterium colombiense | 2 | M28D | 198 | ++ | + |
| t808375 | Mycobacterium colombiense | 2 | T29S | 199 | ++ | + |
| t815628 | Mycobacterium colombiense | 2 | T30P | 200 | ++ | + |
| t810452 | Mycobacterium colombiense | 2 | T30S | 201 | + | + |
| t810689 | Mycobacterium colombiense | 2 | T30W | 202 | + | + |
| t810671 | Mycobacterium colombiense | 2 | E31G | 203 | ++ | + |
| t810432 | Mycobacterium colombiense | 2 | I32F | 204 | ++ | + |
| t810080 | Mycobacterium colombiense | 2 | I32M | 205 | + | + |
| t809159 | Mycobacterium colombiense | 2 | I32V | 206 | + | + |
| t809612 | Mycobacterium colombiense | 2 | I32W | 207 | ++ | + |
| t810438 | Mycobacterium colombiense | 2 | A33W | 208 | + | + |
| t815614 | Mycobacterium colombiense | 2 | E34Q | 209 | + | + |
| t809358 | Mycobacterium colombiense | 2 | N35D | 210 | + | + |
| t810086 | Mycobacterium colombiense | 2 | Y36F | 211 | + | + |
| t809758 | Mycobacterium colombiense | 2 | Y36H | 212 | ++ | + |
| t810039 | Mycobacterium colombiense | 2 | Y36W | 213 | + | + |
| t810728 | Mycobacterium colombiense | 2 | E38D | 214 | + | + |
| t810276 | Mycobacterium colombiense | 2 | E38H | 215 | + | − |
| t809540 | Mycobacterium colombiense | 2 | A39P | 216 | + | + |
| t809728 | Mycobacterium colombiense | 2 | W40F | 217 | ++ | + |
| t810380 | Mycobacterium colombiense | 2 | D42N | 218 | + | + |
| t809916 | Mycobacterium colombiense | 2 | E43D | 219 | + | + |
| t810533 | Mycobacterium colombiense | 2 | D44E | 220 | + | + |
| t810037 | Mycobacterium colombiense | 2 | D44N | 221 | + | + |
| t810493 | Mycobacterium colombiense | 2 | V47I | 222 | + | + |
| t809120 | Mycobacterium colombiense | 2 | V47M | 223 | ++ | + |
| t809211 | Mycobacterium colombiense | 2 | A48E | 224 | + | + |
| t808983 | Mycobacterium colombiense | 2 | A48W | 225 | + | + |
| t809676 | Mycobacterium colombiense | 2 | D49C | 226 | ++ | + |
| t810605 | Mycobacterium colombiense | 2 | D49H | 227 | + | + |
| t815618 | Mycobacterium colombiense | 2 | D49M | 228 | ++ | + |
| t809911 | Mycobacterium colombiense | 2 | D49W | 229 | + | + |
| t809369 | Mycobacterium colombiense | 2 | V51I | 230 | + | + |
| t808456 | Mycobacterium colombiense | 2 | V51L | 231 | + | + |
| t810516 | Mycobacterium colombiense | 2 | K52R | 232 | + | + |
| t808988 | Mycobacterium colombiense | 2 | R53E | 233 | ++ | + |
| t815571 | Mycobacterium colombiense | 2 | R53Q | 234 | + | + |
| t810446 | Mycobacterium colombiense | 2 | N55K | 235 | + | + |
| t815638 | Mycobacterium colombiense | 2 | E56D | 236 | + | + |
| t809610 | Mycobacterium colombiense | 2 | E56Q | 237 | + | + |
| t815570 | Mycobacterium colombiense | 2 | E56R | 238 | + | + |
| t810313 | Mycobacterium colombiense | 2 | L57F | 239 | + | + |
| t809618 | Mycobacterium colombiense | 2 | L57Y | 240 | − | − |
| t809338 | Mycobacterium colombiense | 2 | A59E | 241 | + | + |
| t810119 | Mycobacterium colombiense | 2 | A59Q | 242 | + | + |
| t810002 | Mycobacterium colombiense | 2 | R60A | 243 | + | + |
| t809857 | Mycobacterium colombiense | 2 | R60H | 244 | + | + |
| t809484 | Mycobacterium colombiense | 2 | D63N | 245 | ++ | + |
| t810434 | Mycobacterium colombiense | 2 | T64S | 246 | + | + |
| t809563 | Mycobacterium colombiense | 2 | G72D | 247 | + | + |
| t809947 | Mycobacterium colombiense | 2 | G74R | 248 | − | − |
| t810719 | Mycobacterium colombiense | 2 | Y76D | 249 | + | + |
| t808455 | Mycobacterium colombiense | 2 | Y76N | 250 | + | + |
| t815585 | Mycobacterium colombiense | 2 | I77P | 251 | + | − |
| t810069 | Mycobacterium colombiense | 2 | I77V | 252 | + | + |
| t810302 | Mycobacterium colombiense | 2 | P78D | 253 | ++ | + |
| t809559 | Mycobacterium colombiense | 2 | P78E | 254 | ++ | + |
| t810212 | Mycobacterium colombiense | 2 | I80L | 255 | + | + |
| t810224 | Mycobacterium colombiense | 2 | I80M | 256 | + | + |
| t808449 | Mycobacterium colombiense | 2 | I80V | 257 | + | + |
| t810612 | Mycobacterium colombiense | 2 | A81R | 258 | + | + |
| t810603 | Mycobacterium colombiense | 2 | R82E | 259 | + | + |
| t809637 | Mycobacterium colombiense | 2 | R82K | 260 | + | + |
| t809025 | Mycobacterium colombiense | 2 | V83I | 261 | ++ | + |
| t809654 | Mycobacterium colombiense | 2 | V83L | 262 | + | + |
| t810480 | Mycobacterium colombiense | 2 | A84S | 263 | + | + |
| t810050 | Mycobacterium colombiense | 2 | A85E | 264 | + | + |
| t809428 | Mycobacterium colombiense | 2 | A85R | 265 | ++ | + |
| t810120 | Mycobacterium colombiense | 2 | E86R | 266 | + | + |
| t810377 | Mycobacterium colombiense | 2 | T87S | 267 | + | + |
| t810466 | Mycobacterium colombiense | 2 | E88G | 268 | + | + |
| t810529 | Mycobacterium colombiense | 2 | L89M | 269 | ++ | + |
| t810401 | Mycobacterium colombiense | 2 | L89V | 270 | + | + |
| t809084 | Mycobacterium colombiense | 2 | N90H | 271 | ++ | + |
| t810414 | Mycobacterium colombiense | 2 | I91V | 272 | + | + |
| t809671 | Mycobacterium colombiense | 2 | V92I | 273 | + | + |
| t809816 | Mycobacterium colombiense | 2 | V93C | 274 | + | + |
| t810450 | Mycobacterium colombiense | 2 | T99C | 275 | ++ | + |
| t810588 | Mycobacterium colombiense | 2 | V103H | 276 | ++ | ++ |
| t810609 | Mycobacterium colombiense | 2 | V103W | 277 | + | + |
| t815552 | Mycobacterium colombiense | 2 | V103Y | 278 | + | + |
| t809096 | Mycobacterium colombiense | 2 | M105W | 279 | + | + |
| t809565 | Mycobacterium colombiense | 2 | Y106F | 280 | + | + |
| t810731 | Mycobacterium colombiense | 2 | Y106H | 281 | + | + |
| t809528 | Mycobacterium colombiense | 2 | Y106W | 282 | ++ | + |
| t810115 | Mycobacterium colombiense | 2 | F107M | 283 | ++ | + |
| t810619 | Mycobacterium colombiense | 2 | F107W | 284 | + | + |
| t810402 | Mycobacterium colombiense | 2 | F107Y | 285 | + | + |
| t809359 | Mycobacterium colombiense | 2 | H108R | 286 | − | − |
| t809705 | Mycobacterium colombiense | 2 | Y109F | 287 | + | + |
| t809119 | Mycobacterium colombiense | 2 | Y109W | 288 | + | + |
| t810504 | Mycobacterium colombiense | 2 | L110M | 289 | + | + |
| t810092 | Mycobacterium colombiense | 2 | L110W | 290 | + | + |
| t815607 | Mycobacterium colombiense | 2 | E115D | 291 | + | + |
| t809487 | Mycobacterium colombiense | 2 | G118S | 292 | ++ | + |
| t809020 | Mycobacterium colombiense | 2 | G118T | 293 | + | + |
| t810560 | Mycobacterium colombiense | 2 | E120D | 294 | + | + |
| t809109 | Mycobacterium colombiense | 2 | I121E | 295 | ++ | + |
| t809724 | Mycobacterium colombiense | 2 | I121Q | 296 | + | + |
| t810537 | Mycobacterium colombiense | 2 | M1221 | 297 | ++ | + |
| t809445 | Mycobacterium colombiense | 2 | M122L | 298 | + | + |
| t809636 | Mycobacterium colombiense | 2 | T123A | 299 | + | + |
| t810648 | Mycobacterium colombiense | 2 | D124E | 300 | + | + |
| t809426 | Mycobacterium colombiense | 2 | V127I | 301 | ++ | + |
| t810205 | Mycobacterium colombiense | 2 | R128H | 302 | + | + |
| t809567 | Mycobacterium colombiense | 2 | R128N | 303 | + | + |
| t809957 | Mycobacterium colombiense | 2 | Q132D | 304 | + | + |
| t810371 | Mycobacterium colombiense | 2 | Q132E | 305 | + | + |
| 1810654 | Mycobacterium colombiense | 2 | I134V | 306 | + | + |
| t815569 | Mycobacterium colombiense | 2 | A135E | 307 | + | + |
| t810390 | Mycobacterium colombiense | 2 | A135G | 308 | + | + |
| t808407 | Mycobacterium colombiense | 2 | D136G | 309 | + | + |
| t809954 | Mycobacterium colombiense | 2 | I139V | 310 | + | + |
| t810203 | Mycobacterium colombiense | 2 | K140H | 311 | + | + |
| t810360 | Mycobacterium colombiense | 2 | K140R | 312 | + | + |
| t808441 | Mycobacterium colombiense | 2 | T150H | 313 | + | + |
| t808451 | Mycobacterium colombiense | 2 | T150S | 314 | + | + |
| t810375 | Mycobacterium colombiense | 2 | T150Y | 315 | + | + |
| t810192 | Mycobacterium colombiense | 2 | P151D | 316 | ++ | + |
| t810556 | Mycobacterium colombiense | 2 | P151H | 317 | ++ | + |
| t810268 | Mycobacterium colombiense | 2 | P151N | 318 | ++ | + |
| t809996 | Mycobacterium colombiense | 2 | P151W | 319 | ++ | ++ |
| t810130 | Mycobacterium colombiense | 2 | V153I | 320 | + | + |
| t810627 | Mycobacterium colombiense | 2 | V153W | 321 | + | − |
| t809615 | Mycobacterium colombiense | 2 | P155D | 322 | ++ | + |
| t815679 | Mycobacterium colombiense | 2 | P155E | 323 | + | + |
| t809022 | Mycobacterium colombiense | 2 | G156W | 324 | + | + |
| t809324 | Mycobacterium colombiense | 2 | V157E | 325 | − | − |
| t815692 | Mycobacterium colombiense | 2 | E158H | 326 | + | + |
| t810509 | Mycobacterium colombiense | 2 | A165C | 327 | + | + |
| t809928 | Mycobacterium colombiense | 2 | Q166R | 328 | + | + |
| t810105 | Mycobacterium colombiense | 2 | H168Q | 329 | + | + |
| t810709 | Mycobacterium colombiense | 2 | G182D | 330 | + | + |
| t810283 | Mycobacterium colombiense | 2 | L183T | 331 | + | + |
| 1810733 | Mycobacterium colombiense | 2 | L187F | 332 | + | + |
| t815698 | Mycobacterium colombiense | 2 | L187H | 333 | + | + |
| t810346 | Mycobacterium colombiense | 2 | L187M | 334 | + | + |
| t810071 | Mycobacterium colombiense | 2 | E188C | 335 | + | − |
| t810285 | Mycobacterium colombiense | 2 | E188W | 336 | + | + |
| t810604 | Mycobacterium colombiense | 2 | Q190I | 337 | + | + |
| t810122 | Mycobacterium colombiense | 2 | Q190L | 338 | + | + |
| 1809719 | Mycobacterium colombiense | 2 | K191R | 339 | ++ | + |
| t810408 | Mycobacterium colombiense | 2 | F193L | 340 | + | + |
| t809568 | Mycobacterium colombiense | 2 | E194D | 341 | ++ | + |
| t809841 | Mycobacterium colombiense | 2 | E195D | 342 | + | + |
| t809743 | Mycobacterium colombiense | 2 | L200P | 343 | + | + |
| t810553 | Mycobacterium colombiense | 2 | S201N | 344 | + | + |
| t810024 | Mycobacterium colombiense | 2 | R202H | 345 | + | + |
| t809738 | Mycobacterium colombiense | 2 | R202K | 346 | + | + |
| t809989 | Mycobacterium colombiense | 2 | V203C | 347 | + | + |
| t810215 | Mycobacterium colombiense | 2 | V203I | 348 | + | + |
| t810040 | Mycobacterium colombiense | 2 | I214H | 349 | − | − |
| t809111 | Mycobacterium colombiense | 2 | I214M | 350 | + | + |
| t810428 | Mycobacterium colombiense | 2 | G215D | 351 | + | + |
| t809736 | Mycobacterium colombiense | 2 | G215E | 352 | + | + |
| t808951 | Mycobacterium colombiense | 2 | E219D | 353 | + | + |
| t810502 | Mycobacterium colombiense | 2 | L220I | 354 | + | + |
| t809006 | Mycobacterium colombiense | 2 | L220M | 355 | + | + |
| t810322 | Mycobacterium colombiense | 2 | L220V | 356 | + | + |
| t810252 | Mycobacterium colombiense | 2 | I221A | 357 | + | + |
| t815642 | Mycobacterium colombiense | 2 | I221C | 358 | + | + |
| t809353 | Mycobacterium colombiense | 2 | I221M | 359 | + | + |
| t815620 | Mycobacterium colombiense | 2 | A222H | 360 | + | + |
| t810501 | Mycobacterium colombiense | 2 | A223R | 361 | + | + |
| t809760 | Mycobacterium colombiense | 2 | S225C | 362 | + | + |
| t809122 | Mycobacterium colombiense | 2 | Y226W | 363 | + | + |
| t815720 | Mycobacterium colombiense | 2 | L227I | 364 | + | + |
| t810661 | Mycobacterium colombiense | 2 | L227V | 365 | + | + |
| t810359 | Mycobacterium colombiense | 2 | D235C | 366 | + | + |
| t810476 | Mycobacterium colombiense | 2 | A236H | 367 | + | + |
| t808406 | Mycobacterium colombiense | 2 | A236K | 368 | ++ | ++ |
| t815619 | Mycobacterium colombiense | 2 | A236W | 369 | + | + |
| t809037 | Mycobacterium colombiense | 2 | L238H | 370 | ++ | + |
| t809347 | Mycobacterium colombiense | 2 | L238M | 371 | + | + |
| t810569 | Mycobacterium colombiense | 2 | L238Y | 372 | + | − |
| t810596 | Mycobacterium colombiense | 2 | P239S | 373 | + | + |
| t810054 | Mycobacterium colombiense | 2 | F240D | 374 | + | + |
| t810184 | Mycobacterium colombiense | 2 | F240W | 375 | + | + |
| t810468 | Mycobacterium colombiense | 2 | F240Y | 376 | + | + |
| t815662 | Mycobacterium colombiense | 2 | E241D | 377 | + | + |
| t810009 | Mycobacterium colombiense | 2 | D242E | 378 | + | + |
| t810630 | Mycobacterium colombiense | 2 | V244C | 379 | + | + |
| t808993 | Mycobacterium colombiense | 2 | N245D | 380 | + | + |
| t809648 | Mycobacterium colombiense | 2 | N245E | 381 | + | + |
| t809522 | Mycobacterium colombiense | 2 | N245R | 382 | ++ | + |
| t810405 | Mycobacterium colombiense | 2 | T246L | 383 | ++ | + |
| t810591 | Mycobacterium colombiense | 2 | T246M | 384 | + | + |
| t810166 | Mycobacterium colombiense | 2 | V247I | 385 | + | + |
| t809775 | Mycobacterium colombiense | 2 | V247L | 386 | + | + |
| t810552 | Mycobacterium colombiense | 2 | Q249E | 387 | + | + |
| t815718 | Mycobacterium colombiense | 2 | Q249H | 388 | + | + |
| t815583 | Mycobacterium colombiense | 2 | Q249R | 389 | + | + |
| t809669 | Mycobacterium colombiense | 2 | Q249W | 390 | + | + |
| t809108 | Mycobacterium colombiense | 2 | M250L | 391 | ++ | + |
| t810325 | Mycobacterium colombiense | 2 | C251I | 392 | + | + |
| t809737 | Mycobacterium colombiense | 2 | C251V | 393 | ++ | + |
| t808978 | Mycobacterium colombiense | 2 | E252H | 394 | + | + |
| t815649 | Mycobacterium colombiense | 2 | R253N | 395 | + | + |
| t810196 | Mycobacterium colombiense | 2 | H255W | 396 | − | − |
| t810121 | Mycobacterium colombiense | 2 | H255Y | 397 | + | + |
| t809762 | Mycobacterium colombiense | 2 | K258H | 398 | + | + |
| t810453 | Mycobacterium colombiense | 2 | K258R | 399 | + | + |
| t809220 | Mycobacterium colombiense | 2 | M259I | 400 | ++ | + |
| t809822 | Mycobacterium colombiense | 2 | A271G | 401 | + | + |
| t810666 | Mycobacterium colombiense | 2 | L272C | 402 | ++ | + |
| t808967 | Mycobacterium colombiense | 2 | L272H | 403 | + | + |
| t809895 | Mycobacterium colombiense | 2 | L272M | 404 | ++ | + |
| t809936 | Mycobacterium colombiense | 2 | L272W | 405 | ++ | ++ |
| 1809363 | Mycobacterium colombiense | 2 | D274G | 406 | + | + |
| 1810233 | Mycobacterium colombiense | 2 | D274W | 407 | + | + |
| t808999 | Mycobacterium colombiense | 2 | E275K | 408 | + | + |
| t809573 | Mycobacterium colombiense | 2 | L276W | 409 | + | − |
| t810644 | Mycobacterium colombiense | 2 | V277W | 410 | + | + |
| t809667 | Mycobacterium colombiense | 2 | S278R | 411 | + | + |
| t809644 | Mycobacterium colombiense | 2 | Q279H | 412 | + | + |
| t809628 | Mycobacterium colombiense | 2 | Q279K | 413 | + | + |
| t809569 | Mycobacterium colombiense | 2 | Q279R | 414 | + | + |
| t809124 | Mycobacterium colombiense | 2 | M281F | 415 | ++ | + |
| t815554 | Mycobacterium colombiense | 2 | M281Y | 416 | ++ | + |
| t810582 | Mycobacterium colombiense | 2 | P282G | 417 | + | + |
| t809535 | Mycobacterium colombiense | 2 | N283D | 418 | ++ | + |
| t810388 | Mycobacterium colombiense | 2 | N283G | 419 | + | ++ |
| t809729 | Mycobacterium colombiense | 2 | H285G | 420 | + | ++ |
| t810688 | Mycobacterium colombiense | 2 | L287T | 421 | + | + |
| t810610 | Mycobacterium colombiense | 2 | H288F | 422 | ++ | + |
| t810555 | Mycobacterium colombiense | 2 | H288Y | 423 | ++ | + |
| t809920 | Mycobacterium colombiense | 2 | I289L | 424 | + | + |
| t810351 | Mycobacterium colombiense | 2 | I289V | 425 | + | − |
| t809831 | Mycobacterium colombiense | 2 | H290F | 426 | + | + |
| t809098 | Mycobacterium colombiense | 2 | H290L | 427 | ++ | + |
| t808363 | Mycobacterium colombiense | 2 | N291D | 428 | + | + |
| t809192 | Mycobacterium colombiense | 2 | N291E | 429 | ++ | + |
| t810084 | Mycobacterium colombiense | 2 | N291R | 430 | + | + |
| 809403 | Mycobacterium colombiense | 2 | N291T | 431 | + | + |
| t809301 | Mycobacterium colombiense | 2 | D292N | 432 | + | + |
| t810188 | Mycobacterium colombiense | 2 | D292R | 433 | ++ | − |
| t810412 | Mycobacterium colombiense | 2 | V293F | 434 | − | − |
| t810640 | Mycobacterium colombiense | 2 | V293I | 435 | + | + |
| t810572 | Mycobacterium colombiense | 2 | I294L | 436 | + | + |
| t810566 | Mycobacterium colombiense | 2 | I294V | 437 | ++ | + |
| t810535 | Mycobacterium colombiense | 2 | A296M | 438 | + | + |
| t810242 | Mycobacterium colombiense | 2 | A296R | 439 | + | − |
| t810076 | Mycobacterium colombiense | 2 | K298M | 440 | + | + |
| t808452 | Mycobacterium colombiense | 2 | K298R | 441 | + | + |
| t809334 | Mycobacterium colombiense | 2 | E299K | 442 | + | + |
| t809963 | Mycobacterium colombiense | 2 | E299Q | 443 | + | + |
| t810263 | Mycobacterium colombiense | 2 | E299R | 444 | + | + |
| t809626 | Mycobacterium colombiense | 2 | R300A | 445 | + | + |
| t809472 | Mycobacterium colombiense | 2 | T303D | 446 | ++ | + |
| t808453 | Mycobacterium colombiense | 2 | T303S | 447 | + | + |
| t815591 | Mycobacterium colombiense | 2 | D304E | 448 | + | + |
| t808982 | Mycobacterium colombiense | 2 | D304Q | 449 | ++ | + |
| t809283 | Mycobacterium colombiense | 2 | E305A | 450 | + | + |
| t809792 | Mycobacterium colombiense | 2 | E305D | 451 | + | + |
| t810336 | Mycobacterium colombiense | 2 | Q306D | 452 | + | + |
| t810177 | Mycobacterium colombiense | 2 | Q306E | 453 | + | + |
| t815606 | Mycobacterium colombiense | 2 | L307I | 454 | + | + |
| t810218 | Mycobacterium colombiense | 2 | L307V | 455 | + | + |
| t810383 | Mycobacterium colombiense | 2 | H308E | 456 | + | + |
| t809807 | Mycobacterium colombiense | 2 | H308N | 457 | ++ | + |
| t810020 | Mycobacterium colombiense | 2 | H308R | 458 | + | + |
| t809653 | Mycobacterium colombiense | 2 | T309K | 459 | + | + |
| t809400 | Mycobacterium colombiense | 2 | T309Q | 460 | + | + |
| t808409 | Mycobacterium colombiense | 2 | T309R | 461 | ++ | + |
| t809672 | Mycobacterium colombiense | 2 | L311F | 462 | + | + |
| t808408 | Mycobacterium colombiense | 2 | L311M | 463 | + | + |
| t809950 | Mycobacterium colombiense | 2 | L311T | 464 | ++ | + |
| t815555 | Mycobacterium colombiense | 2 | V312I | 465 | + | + |
| t810007 | Mycobacterium colombiense | 2 | D313E | 466 | + | + |
| t809827 | Mycobacterium colombiense | 2 | R316A | 467 | + | + |
| t810282 | Mycobacterium colombiense | 2 | R316K | 468 | + | + |
| t810403 | Mycobacterium colombiense | 2 | R316Q | 469 | + | + |
| t810296 | Mycobacterium colombiense | 2 | R317K | 470 | + | + |
| 1809973 | Mycobacterium colombiense | 2 | R317N | 471 | ++ | + |
| t810223 | Mycobacterium colombiense | 2 | I318F | 472 | + | + |
| t809512 | Mycobacterium colombiense | 2 | I318L | 473 | ++ | + |
| t815717 | Mycobacterium colombiense | 2 | I318M | 474 | + | + |
| t809948 | Mycobacterium colombiense | 2 | E320D | 475 | ++ | + |
| t809239 | Mycobacterium colombiense | 2 | E320Q | 476 | ++ | + |
| t808443 | Mycobacterium colombiense | 2 | E320S | 477 | + | + |
| t809662 | Mycobacterium colombiense | 2 | Q322E | 478 | + | + |
| t810066 | Mycobacterium colombiense | 2 | Q322K | 479 | + | + |
| t809068 | Mycobacterium colombiense | 2 | Q322R | 480 | + | + |
| t809658 | Mycobacterium colombiense | 2 | A324P | 481 | + | + |
| t809905 | Mycobacterium colombiense | 2 | A324S | 482 | + | + |
| t809855 | Mycobacterium colombiense | 2 | Y325F | 483 | + | + |
| 1808373 | Mycobacterium colombiense | 2 | Y325H | 484 | ++ | + |
| t809854 | Mycobacterium colombiense | 2 | Y325W | 485 | + | + |
| t809710 | Mycobacterium colombiense | 2 | E326K | 486 | + | ++ |
| t809971 | Mycobacterium colombiense | 2 | E326Q | 487 | + | + |
| t809675 | Mycobacterium colombiense | 2 | E326R | 488 | + | + |
| t810506 | Mycobacterium colombiense | 2 | (N/A) | 489 | + | + |
| t809986 | Mycobacterium asiaticum | 3 | H22N | 490 | − | − |
| t810369 | Mycobacterium asiaticum | 3 | H22S | 491 | − | − |
| t809081 | Mycobacterium asiaticum | 3 | H22T | 492 | − | − |
| t810460 | Mycobacterium asiaticum | 3 | E23D | 493 | − | − |
| t810558 | Mycobacterium asiaticum | 3 | H24N | 494 | − | − |
| t810392 | Mycobacterium asiaticum | 3 | V25A | 495 | + | + |
| t810055 | Mycobacterium asiaticum | 3 | V25C | 496 | + | − |
| t810653 | Mycobacterium asiaticum | 3 | V25I | 497 | + | + |
| t810267 | Mycobacterium asiaticum | 3 | V25T | 498 | + | + |
| t809538 | Mycobacterium asiaticum | 3 | I27C | 499 | + | − |
| t810590 | Mycobacterium asiaticum | 3 | I27F | 500 | + | + |
| t809903 | Mycobacterium asiaticum | 3 | I27L | 501 | + | ++ |
| t815557 | Mycobacterium asiaticum | 3 | I27M | 502 | ++ | ++ |
| t809642 | Mycobacterium asiaticum | 3 | I27T | 503 | + | + |
| t810342 | Mycobacterium asiaticum | 3 | I27V | 504 | + | − |
| t809499 | Mycobacterium asiaticum | 3 | I27W | 505 | + | − |
| t809683 | Mycobacterium asiaticum | 3 | I27Y | 506 | + | − |
| t810368 | Mycobacterium asiaticum | 3 | L68A | 507 | + | − |
| t810270 | Mycobacterium asiaticum | 3 | L68M | 508 | + | + |
| t809194 | Mycobacterium asiaticum | 3 | L68N | 509 | + | + |
| t810679 | Mycobacterium asiaticum | 3 | L68P | 510 | + | + |
| t810635 | Mycobacterium asiaticum | 3 | L68Q | 511 | + | + |
| t810701 | Mycobacterium asiaticum | 3 | T69S | 512 | + | + |
| t810539 | Mycobacterium asiaticum | 3 | V70C | 513 | + | ++ |
| t810087 | Mycobacterium asiaticum | 3 | V70P | 514 | ++ | ++ |
| t810178 | Mycobacterium asiaticum | 3 | L73C | 515 | − | − |
| t815626 | Mycobacterium asiaticum | 3 | L73H | 516 | − | − |
| t809700 | Mycobacterium asiaticum | 3 | L73M | 517 | − | − |
| t815719 | Mycobacterium asiaticum | 3 | L73V | 518 | − | − |
| t810198 | Mycobacterium asiaticum | 3 | Y98C | 519 | − | − |
| t815685 | Mycobacterium asiaticum | 3 | Y98F | 520 | − | − |
| t809317 | Mycobacterium asiaticum | 3 | Y98H | 521 | − | − |
| t810398 | Mycobacterium asiaticum | 3 | Y100D | 522 | ++ | ++ |
| t810327 | Mycobacterium asiaticum | 3 | Y100E | 523 | + | + |
| t809918 | Mycobacterium asiaticum | 3 | Y100H | 524 | + | + |
| t809465 | Mycobacterium asiaticum | 3 | Y100Q | 525 | ++ | ++ |
| t809720 | Mycobacterium asiaticum | 3 | L144I | 526 | + | + |
| t810155 | Mycobacterium asiaticum | 3 | K145C | 527 | − | − |
| t810430 | Mycobacterium asiaticum | 3 | K145E | 528 | − | − |
| t810597 | Mycobacterium asiaticum | 3 | K145Q | 529 | − | − |
| t810568 | Mycobacterium asiaticum | 3 | K145S | 530 | − | − |
| t809953 | Mycobacterium asiaticum | 3 | K145T | 531 | − | − |
| t815705 | Mycobacterium asiaticum | 3 | C146I | 532 | + | + |
| t815582 | Mycobacterium asiaticum | 3 | C146L | 533 | − | − |
| t810427 | Mycobacterium asiaticum | 3 | C146V | 534 | + | + |
| t809988 | Mycobacterium asiaticum | 3 | C146Y | 535 | − | − |
| t810633 | Mycobacterium asiaticum | 3 | A147C | 536 | + | + |
| t809852 | Mycobacterium asiaticum | 3 | A147H | 537 | − | − |
| t809596 | Mycobacterium asiaticum | 3 | A147W | 538 | − | − |
| t809826 | Mycobacterium asiaticum | 3 | T148A | 539 | + | + |
| t809095 | Mycobacterium asiaticum | 3 | T148I | 540 | + | + |
| t809706 | Mycobacterium asiaticum | 3 | T148V | 541 | ++ | + |
| t809131 | Mycobacterium asiaticum | 3 | T148W | 542 | − | − |
| t809588 | Mycobacterium asiaticum | 3 | T148Y | 543 | − | − |
| t808992 | Mycobacterium asiaticum | 3 | V164I | 544 | + | + |
| t809237 | Mycobacterium asiaticum | 3 | S176C | 545 | + | + |
| t810262 | Mycobacterium asiaticum | 3 | S176F | 546 | + | + |
| t809085 | Mycobacterium asiaticum | 3 | S176H | 547 | + | + |
| t809811 | Mycobacterium asiaticum | 3 | S176I | 548 | + | + |
| t809066 | Mycobacterium asiaticum | 3 | S176L | 549 | + | + |
| 815573 | Mycobacterium asiaticum | 3 | S176V | 550 | + | + |
| t809949 | Mycobacterium asiaticum | 3 | S176W | 551 | − | − |
| t815648 | Mycobacterium asiaticum | 3 | S176Y | 552 | + | + |
| t810423 | Mycobacterium asiaticum | 3 | T177C | 553 | + | + |
| t810400 | Mycobacterium asiaticum | 3 | H178A | 554 | − | − |
| t808973 | Mycobacterium asiaticum | 3 | H178D | 555 | + | + |
| t810230 | Mycobacterium asiaticum | 3 | H178R | 556 | − | − |
| t815709 | Mycobacterium asiaticum | 3 | H178S | 557 | − | − |
| t810019 | Mycobacterium asiaticum | 3 | H178T | 558 | − | − |
| t809294 | Mycobacterium asiaticum | 3 | T179C | 559 | + | + |
| t808437 | Mycobacterium asiaticum | 3 | T179F | 560 | − | − |
| t810362 | Mycobacterium asiaticum | 3 | T179M | 561 | − | − |
| t815581 | Mycobacterium asiaticum | 3 | A181C | 562 | − | − |
| t810415 | Mycobacterium asiaticum | 3 | A181R | 563 | − | − |
| t808403 | Mycobacterium asiaticum | 3 | A181S | 564 | + | + |
| t809331 | Mycobacterium asiaticum | 3 | Q189A | 565 | + | + |
| t810623 | Mycobacterium asiaticum | 3 | Q189C | 566 | + | + |
| t810006 | Mycobacterium asiaticum | 3 | Q189E | 567 | − | − |
| t808438 | Mycobacterium asiaticum | 3 | Q189I | 568 | + | + |
| t810678 | Mycobacterium asiaticum | 3 | Q189L | 569 | − | − |
| t808435 | Mycobacterium asiaticum | 3 | Q189M | 570 | + | + |
| t809620 | Mycobacterium asiaticum | 3 | Q189V | 571 | + | + |
| t809243 | Mycobacterium asiaticum | 3 | G206N | 572 | − | − |
| t810681 | Mycobacterium asiaticum | 3 | G206S | 573 | + | + |
| t809876 | Mycobacterium asiaticum | 3 | H207M | 574 | − | − |
| t810663 | Mycobacterium asiaticum | 3 | H207N | 575 | − | − |
| t809794 | Mycobacterium asiaticum | 3 | S208A | 576 | + | + |
| t810271 | Mycobacterium asiaticum | 3 | S208C | 577 | + | + |
| t810426 | Mycobacterium asiaticum | 3 | S208T | 578 | + | + |
| t809698 | Mycobacterium asiaticum | 3 | G209N | 579 | + | + |
| t810495 | Mycobacterium asiaticum | 3 | D210C | 580 | − | − |
| t810016 | Mycobacterium asiaticum | 3 | D210E | 581 | − | − |
| t815694 | Mycobacterium sp. 852014- | 3 | D210H | 582 | − | − |
| | 52450_SCH5900713 | | | | | |
| t815688 | Mycobacterium asiaticum | 3 | D210P | 583 | − | − |
| t810682 | Mycobacterium asiaticum | 3 | D210W | 584 | − | − |
| t810118 | Mycobacterium asiaticum | 3 | G228C | 585 | − | − |
| t809417 | Mycobacterium asiaticum | 3 | G228D | 586 | − | − |
| t809229 | Mycobacterium asiaticum | 3 | G228Q | 587 | − | − |
| t809739 | Mycobacterium asiaticum | 3 | G228S | 588 | + | + |
| t810616 | Mycobacterium asiaticum | 3 | D230N | 589 | − | − |
| t808364 | Mycobacterium asiaticum | 3 | R231H | 590 | − | − |
| t809005 | Mycobacterium asiaticum | 3 | R231M | 591 | − | − |
| t810724 | Mycobacterium asiaticum | 3 | R231N | 592 | − | − |
| t809127 | Mycobacterium asiaticum | 3 | R231Q | 593 | − | − |
| t810298 | Mycobacterium asiaticum | 3 | R231T | 594 | − | − |
| t809772 | Mycobacterium asiaticum | 3 | R231W | 595 | − | − |
| t810142 | Mycobacterium asiaticum | 3 | V260I | 596 | ++ | + |
| t809694 | Mycobacterium asiaticum | 3 | S262G | 597 | + | + |
| t810727 | Mycobacterium asiaticum | 3 | H263F | 598 | − | + |
| t810012 | Mycobacterium asiaticum | 3 | H263G | 599 | ++ | + |
| t809849 | Mycobacterium asiaticum | 3 | H263M | 600 | ++ | ++ |
| t810669 | Mycobacterium asiaticum | 3 | H263Q | 601 | ++ | + |
| t809434 | Mycobacterium asiaticum | 3 | H263T | 602 | ++ | + |
| t810629 | Mycobacterium asiaticum | 3 | D264P | 603 | − | − |
| 1810631 | Mycobacterium asiaticum | 3 | D264S | 604 | − | − |
| t810606 | Mycobacterium asiaticum | 3 | D264T | 605 | − | − |
| t809425 | Mycobacterium asiaticum | 3 | A265I | 606 | − | − |
| t809634 | Mycobacterium asiaticum | 3 | A265M | 607 | + | ++ |
| t810637 | Mycobacterium asiaticum | 3 | A265S | 608 | + | + |
| t815633 | Mycobacterium asiaticum | 3 | A265T | 609 | + | + |
| t810507 | Mycobacterium asiaticum | 3 | A265W | 610 | + | ++ |
| t809656 | Mycobacterium asiaticum | 3 | A265Y | 611 | + | ++ |
| t808426 | Mycobacterium asiaticum | 3 | N266A | 612 | ++ | ++ |
| t810033 | Mycobacterium asiaticum | 3 | N266C | 613 | ++ | ++ |
| t809848 | Mycobacterium asiaticum | 3 | N266G | 614 | ++ | ++ |
| t809789 | Mycobacterium asiaticum | 3 | N266H | 615 | + | − |
| t810692 | Mycobacterium asiaticum | 3 | N266I | 616 | ++ | ++ |
| t809349 | Mycobacterium asiaticum | 3 | N266L | 617 | ++ | ++ |
| t809582 | Mycobacterium asiaticum | 3 | N266Q | 618 | ++ | + |
| t810384 | Mycobacterium asiaticum | 3 | N266T | 619 | ++ | ++ |
| t810448 | Mycobacterium asiaticum | 3 | N266W | 620 | + | − |
| t809790 | Mycobacterium asiaticum | 3 | C267T | 621 | + | + |
| t810565 | Mycobacterium asiaticum | 3 | C267W | 622 | ++ | + |
| t810251 | Mycobacterium asiaticum | 3 | W284E | 623 | + | + |
| t815643 | Mycobacterium asiaticum | 3 | W284H | 624 | + | ++ |
| t810599 | Mycobacterium asiaticum | 3 | W284I | 625 | − | − |
| t810638 | Mycobacterium asiaticum | 3 | W284K | 626 | − | − |
| t810409 | Mycobacterium asiaticum | 3 | W284P | 627 | − | − |
| t815625 | Mycobacterium asiaticum | 3 | W284R | 628 | − | − |
| t815657 | Mycobacterium asiaticum | 3 | W284T | 629 | + | ++ |
| t815650 | Mycobacterium gordonae | 4 | L20M | 630 | + | + |
| t815629 | Mycobacterium gordonae | 4 | E23D | 631 | − | − |
| t809083 | Mycobacterium gordonae | 4 | V25L | 632 | + | + |
| t809233 | Mycobacterium gordonae | 4 | V25M | 633 | + | + |
| t809269 | Mycobacterium gordonae | 4 | F26H | 634 | + | + |
| t809184 | Mycobacterium gordonae | 4 | F26L | 635 | − | − |
| t808378 | Mycobacterium gordonae | 4 | F26M | 636 | − | − |
| t809704 | Mycobacterium gordonae | 4 | F26W | 637 | + | + |
| t809210 | Mycobacterium gordonae | 4 | I27C | 638 | + | − |
| t809955 | Mycobacterium gordonae | 4 | I27F | 639 | + | + |
| t810022 | Mycobacterium gordonae | 4 | I27M | 640 | + | + |
| t809254 | Mycobacterium gordonae | 4 | I27T | 641 | + | + |
| t809570 | Mycobacterium gordonae | 4 | I27V | 642 | + | + |
| t810549 | Mycobacterium gordonae | 4 | I27W | 643 | − | − |
| t809011 | Mycobacterium gordonae | 4 | I27Y | 644 | − | − |
| t810424 | Mycobacterium gordonae | 4 | V66I | 645 | + | + |
| t810032 | Mycobacterium gordonae | 4 | L68A | 646 | − | − |
| t815616 | Mycobacterium gordonae | 4 | L68C | 647 | + | + |
| t809296 | Mycobacterium gordonae | 4 | L68M | 648 | + | + |
| t815658 | Mycobacterium gordonae | 4 | L68N | 649 | + | + |
| t815715 | Mycobacterium gordonae | 4 | T69Q | 650 | − | − |
| t809864 | Mycobacterium gordonae | 4 | T69S | 651 | + | − |
| t809212 | Mycobacterium gordonae | 4 | L73C | 652 | − | − |
| t809008 | Mycobacterium gordonae | 4 | L73M | 653 | − | − |
| t809024 | Mycobacterium gordonae | 4 | Y98C | 654 | − | − |
| t809972 | Mycobacterium gordonae | 4 | Y98W | 655 | + | + |
| t809670 | Mycobacterium gordonae | 4 | F126C | 656 | + | − |
| t809886 | Mycobacterium gordonae | 4 | F126L | 657 | − | − |
| t815558 | Mycobacterium gordonae | 4 | F126M | 658 | + | + |
| t810508 | Mycobacterium gordonae | 4 | L144I | 659 | + | + |
| t809142 | Mycobacterium gordonae | 4 | K145C | 660 | − | − |
| t815659 | Mycobacterium gordonae | 4 | K145E | 661 | − | − |
| t810528 | Mycobacterium gordonae | 4 | K145Q | 662 | − | − |
| t810091 | Mycobacterium gordonae | 4 | K145R | 663 | − | − |
| t810548 | Mycobacterium gordonae | 4 | K145S | 664 | − | − |
| t809047 | Mycobacterium gordonae | 4 | K145T | 665 | − | − |
| t810579 | Mycobacterium gordonae | 4 | C146F | 666 | − | − |
| t809291 | Mycobacterium gordonae | 4 | C146I | 667 | − | − |
| t810065 | Mycobacterium gordonae | 4 | C146V | 668 | + | + |
| t809075 | Mycobacterium gordonae | 4 | A147G | 669 | + | + |
| t810250 | Mycobacterium gordonae | 4 | A147I | 670 | + | + |
| t809787 | Mycobacterium gordonae | 4 | A147M | 671 | ++ | + |
| t809606 | Mycobacterium gordonae | 4 | A147S | 672 | + | + |
| t809518 | Mycobacterium gordonae | 4 | T148C | 673 | + | + |
| t810419 | Mycobacterium gordonae | 4 | T148I | 674 | + | + |
| t809001 | Mycobacterium gordonae | 4 | T148M | 675 | + | + |
| t809682 | Mycobacterium gordonae | 4 | T148V | 676 | ++ | + |
| t810259 | Mycobacterium gordonae | 4 | T148W | 677 | − | − |
| t810435 | Mycobacterium gordonae | 4 | T148Y | 678 | − | − |
| t809249 | Mycobacterium gordonae | 4 | V164I | 679 | + | + |
| t810010 | Mycobacterium gordonae | 4 | V164T | 680 | + | + |
| t810137 | Mycobacterium gordonae | 4 | H168S | 681 | + | + |
| t810655 | Mycobacterium gordonae | 4 | V173C | 682 | + | + |
| t810676 | Mycobacterium gordonae | 4 | S176F | 683 | + | − |
| t809797 | Mycobacterium gordonae | 4 | S176H | 684 | + | + |
| t809699 | Mycobacterium gordonae | 4 | S176I | 685 | + | − |
| t809073 | Mycobacterium gordonae | 4 | S176L | 686 | − | − |
| t808366 | Mycobacterium gordonae | 4 | S176M | 687 | + | + |
| t815612 | Mycobacterium gordonae | 4 | S176T | 688 | + | + |
| t809162 | Mycobacterium gordonae | 4 | S176W | 689 | − | − |
| t808971 | Mycobacterium gordonae | 4 | S176Y | 690 | + | − |
| t809870 | Mycobacterium gordonae | 4 | T177C | 691 | + | − |
| t827635 | Mycobacterium gordonae | 4 | T177I | 692 | − | − |
| t810710 | Mycobacterium gordonae | 4 | T177V | 693 | − | − |
| t815704 | Mycobacterium gordonae | 4 | H178D | 694 | + | + |
| t809943 | Mycobacterium gordonae | 4 | H178Q | 695 | − | − |
| t809685 | Mycobacterium gordonae | 4 | H178R | 696 | − | − |
| t809924 | Mycobacterium gordonae | 4 | H178S | 697 | − | − |
| t809048 | Mycobacterium gordonae | 4 | H178T | 698 | − | − |
| t815632 | Mycobacterium gordonae | 4 | H178V | 699 | − | − |
| t810345 | Mycobacterium gordonae | 4 | H178Y | 700 | + | − |
| t815682 | Mycobacterium gordonae | 4 | T179D | 701 | − | − |
| t809922 | Mycobacterium gordonae | 4 | T179F | 702 | − | − |
| t809270 | Mycobacterium gordonae | 4 | T179I | 703 | − | − |
| t809017 | Mycobacterium gordonae | 4 | T179M | 704 | − | − |
| t809530 | Mycobacterium gordonae | 4 | T179N | 705 | − | − |
| t810376 | Mycobacterium gordonae | 4 | T179W | 706 | − | − |
| t808436 | Mycobacterium gordonae | 4 | A181C | 707 | − | − |
| t815693 | Mycobacterium gordonae | 4 | A181G | 708 | + | + |
| t810395 | Mycobacterium gordonae | 4 | A181H | 709 | − | − |
| t809730 | Mycobacterium gordonae | 4 | A181M | 710 | − | − |
| t809010 | Mycobacterium gordonae | 4 | A181S | 711 | + | + |
| t815670 | Mycobacterium gordonae | 4 | A181W | 712 | − | − |
| t827634 | Mycobacterium gordonae | 4 | Q189A | 713 | + | − |
| t809752 | Mycobacterium gordonae | 4 | Q189C | 714 | + | + |
| t809679 | Mycobacterium gordonae | 4 | Q189E | 715 | − | − |
| t810015 | Mycobacterium gordonae | 4 | Q189I | 716 | + | − |
| t809817 | Mycobacterium gordonae | 4 | Q189L | 717 | + | − |
| t809502 | Mycobacterium gordonae | 4 | Q189M | 718 | + | + |
| t809862 | Mycobacterium gordonae | 4 | Q189V | 719 | + | + |
| t815703 | Mycobacterium gordonae | 4 | I204V | 720 | + | + |
| t808402 | Mycobacterium gordonae | 4 | G206N | 721 | − | − |
| t808395 | Mycobacterium gordonae | 4 | G206S | 722 | + | + |
| t810272 | Mycobacterium gordonae | 4 | H207N | 723 | − | − |
| t810685 | Mycobacterium gordonae | 4 | S208A | 724 | + | − |
| t809196 | Mycobacterium gordonae | 4 | S208C | 725 | + | + |
| t809527 | Mycobacterium gordonae | 4 | S208M | 726 | − | − |
| t810116 | Mycobacterium gordonae | 4 | S208T | 727 | + | + |
| t810114 | Mycobacterium gordonae | 4 | G209C | 728 | − | − |
| t809082 | Mycobacterium gordonae | 4 | G209N | 729 | + | + |
| t815621 | Mycobacterium gordonae | 4 | D210C | 730 | − | − |
| t809812 | Mycobacterium gordonae | 4 | D210E | 731 | − | − |
| t809393 | Mycobacterium gordonae | 4 | D210M | 732 | − | − |
| t815661 | Mycobacterium gordonae | 4 | D210W | 733 | − | − |
| t810607 | Mycobacterium gordonae | 4 | G228A | 734 | − | − |
| t810354 | Mycobacterium gordonae | 4 | G228C | 735 | − | − |
| t815671 | Mycobacterium gordonae | 4 | G228Q | 736 | − | − |
| t810113 | Mycobacterium gordonae | 4 | G228S | 737 | − | − |
| t827638 | Mycobacterium gordonae | 4 | D230S | 738 | − | − |
| t809608 | Mycobacterium gordonae | 4 | R231C | 739 | − | − |
| t809147 | Mycobacterium gordonae | 4 | R231F | 740 | − | − |
| t809838 | Mycobacterium gordonae | 4 | R231G | 741 | − | − |
| t810439 | Mycobacterium gordonae | 4 | R231H | 742 | − | − |
| t815562 | Mycobacterium gordonae | 4 | R231M | 743 | − | − |
| t809842 | Mycobacterium gordonae | 4 | R231N | 744 | − | − |
| t808417 | Mycobacterium gordonae | 4 | R231Q | 745 | − | − |
| t815667 | Mycobacterium gordonae | 4 | R231T | 746 | − | − |
| t810574 | Mycobacterium gordonae | 4 | R231W | 747 | − | − |
| t810411 | Mycobacterium gordonae | 4 | V260I | 748 | + | + |
| t810647 | Mycobacterium gordonae | 4 | S262C | 749 | − | − |
| t809970 | Mycobacterium gordonae | 4 | S262G | 750 | + | + |
| t809419 | Mycobacterium gordonae | 4 | H263C | 751 | + | + |
| t810170 | Mycobacterium gordonae | 4 | H263F | 752 | − | − |
| t809727 | Mycobacterium gordonae | 4 | H263N | 753 | + | + |
| t808413 | Mycobacterium gordonae | 4 | H263S | 754 | + | + |
| t808445 | Mycobacterium gordonae | 4 | H263T | 755 | + | + |
| t810690 | Mycobacterium gordonae | 4 | H263Y | 756 | − | − |
| t809501 | Mycobacterium gordonae | 4 | D264F | 757 | − | − |
| t810378 | Mycobacterium gordonae | 4 | D264N | 758 | − | − |
| t810696 | Mycobacterium gordonae | 4 | A265C | 759 | − | − |
| t815707 | Mycobacterium gordonae | 4 | A265I | 760 | − | − |
| t815595 | Mycobacterium gordonae | 4 | A265L | 761 | + | + |
| t810567 | Mycobacterium gordonae | 4 | A265M | 762 | − | − |
| t809709 | Mycobacterium gordonae | 4 | A265Q | 763 | + | + |
| t809995 | Mycobacterium gordonae | 4 | A265S | 764 | + | + |
| t810307 | Mycobacterium gordonae | 4 | A265T | 765 | + | + |
| t809043 | Mycobacterium gordonae | 4 | A265V | 766 | − | + |
| t809266 | Mycobacterium gordonae | 4 | A265W | 767 | + | ++ |
| t809674 | Mycobacterium gordonae | 4 | A265Y | 768 | + | ++ |
| t809112 | Mycobacterium gordonae | 4 | N266A | 769 | + | ++ |
| t810503 | Mycobacterium gordonae | 4 | N266C | 770 | + | + |
| t809373 | Mycobacterium gordonae | 4 | N266G | 771 | + | + |
| t810200 | Mycobacterium gordonae | 4 | N266H | 772 | − | − |
| t808399 | Mycobacterium gordonae | 4 | N266R | 773 | − | − |
| t815608 | Mycobacterium gordonae | 4 | N266S | 774 | + | + |
| t809774 | Mycobacterium gordonae | 4 | N266T | 775 | ++ | ++ |
| t809882 | Mycobacterium gordonae | 4 | C267A | 776 | + | + |
| t809641 | Mycobacterium gordonae | 4 | C267G | 777 | + | + |
| t809557 | Mycobacterium gordonae | 4 | C267T | 778 | + | + |
| t810670 | Mycobacterium gordonae | 4 | C267W | 779 | + | + |
| t808401 | Mycobacterium gordonae | 4 | W284C | 780 | − | − |
| t809050 | Mycobacterium gordonae | 4 | W284D | 781 | − | − |
| t809956 | Mycobacterium gordonae | 4 | W284E | 782 | − | − |
| t808383 | Mycobacterium gordonae | 4 | W284F | 783 | + | ++ |
| t815551 | Mycobacterium gordonae | 4 | W284H | 784 | + | ++ |
| t809661 | Mycobacterium gordonae | 4 | W284K | 785 | − | − |
| t809632 | Mycobacterium gordonae | 4 | W284M | 786 | + | ++ |
| t809801 | Mycobacterium gordonae | 4 | W284N | 787 | + | ++ |
| t809939 | Mycobacterium gordonae | 4 | W284P | 788 | − | − |
| t809946 | Mycobacterium gordonae | 4 | W284Q | 789 | − | + |
| t809181 | Mycobacterium gordonae | 4 | W284R | 790 | − | + |
| t809614 | Mycobacterium gordonae | 4 | W284T | 791 | − | − |
| t815636 | Mycobacterium gordonae | 4 | W284Y | 792 | + | ++ |
| t809888 | Mycobacterium gordonae | 4 | Y286F | 793 | + | + |
| t808424 | Mycobacterium gordonae | 4 | Y286M | 794 | + | + |
| t809689 | Mycobacterium gordonae | 4 | Y286W | 795 | + | + |
| t815673 | Prostheco-microbium | 6 | L29I | 796 | − | − |
| | hirschii | | | | | |
| t810162 | Prostheco-microbium | 6 | H31R | 797 | − | − |
| | hirschii | | | | | |
| t815700 | Prostheco-microbium | 6 | H31S | 798 | − | − |
| | hirschii | | | | | |
| t810124 | Prostheco-microbium | 6 | L34C | 799 | − | − |
| | hirschii | | | | | |
| t810314 | Prostheco-microbium | 6 | L34I | 800 | − | − |
| | hirschii | | | | | |
| t810389 | Prostheco-microbium | 6 | L34M | 801 | − | − |
| | hirschii | | | | | |
| t815660 | Prostheco-microbium | 6 | L34V | 802 | − | − |
| | hirschii | | | | | |
| t810221 | Prostheco-microbium | 6 | L35I | 803 | − | − |
| | hirschii | | | | | |
| t815683 | Prostheco-microbium | 6 | L35M | 804 | − | − |
| | hirschii | | | | | |
| t808966 | Prostheco-microbium | 6 | H72C | 805 | − | − |
| | hirschii | | | | | |
| t810367 | Prostheco-microbium | 6 | H72D | 806 | − | − |
| | hirschii | | | | | |
| t810563 | Prostheco-microbium | 6 | H72E | 807 | − | − |
| | hirschii | | | | | |
| t815668 | Prostheco-microbium | 6 | H72F | 808 | − | − |
| | hirschii | | | | | |
| t810301 | Prostheco-microbium | 6 | H72M | 809 | − | − |
| | hirschii | | | | | |
| t810226 | Prostheco-microbium | 6 | H72N | 810 | − | − |
| | hirschii | | | | | |
| t810057 | Prostheco-microbium | 6 | H72Q | 811 | − | − |
| | hirschii | | | | | |
| t809556 | Prostheco-microbium | 6 | H72R | 812 | − | − |
| | hirschii | | | | | |
| t810416 | Prostheco-microbium | 6 | H72W | 813 | − | − |
| | hirschii | | | | | |
| t810315 | Prostheco-microbium | 6 | R73C | 814 | − | − |
| | hirschii | | | | | |
| t815635 | Prostheco-microbium | 6 | R73H | 815 | − | − |
| | hirschii | | | | | |
| t810141 | Prostheco-microbium | 6 | R73I | 816 | − | − |
| | hirschii | | | | | |
| t810081 | Prostheco-microbium | 6 | R73K | 817 | − | − |
| | hirschii | | | | | |
| t809475 | Prostheco-microbium | 6 | R73M | 818 | − | − |
| | hirschii | | | | | |
| t810147 | Prostheco-microbium | 6 | R73N | 819 | − | − |
| | hirschii | | | | | |
| t809202 | Prostheco-microbium | 6 | R73T | 820 | − | − |
| | hirschii | | | | | |
| t808953 | Prostheco-microbium | 6 | L74F | 821 | − | − |
| | hirschii | | | | | |
| t810190 | Prostheco-microbium | 6 | L74H | 822 | − | − |
| | hirschii | | | | | |
| t809541 | Prostheco-microbium | 6 | L74I | 823 | − | − |
| | hirschii | | | | | |
| t810291 | Prostheco-microbium | 6 | L74M | 824 | − | − |
| | hirschii | | | | | |
| t810343 | Prostheco-microbium | 6 | L74W | 825 | − | − |
| | hirschii | | | | | |
| t810598 | Prostheco-microbium | 6 | Q75C | 826 | − | − |
| | hirschii | | | | | |
| t809170 | Prostheco-microbium | 6 | Q75E | 827 | − | − |
| | hirschii | | | | | |
| t810253 | Prostheco-microbium | 6 | Q75F | 828 | − | − |
| | hirschii | | | | | |
| t808371 | Prostheco-microbium | 6 | Q75H | 829 | − | − |
| | hirschii | | | | | |
| t809345 | Prostheco-microbium | 6 | Q75K | 830 | − | − |
| | hirschii | | | | | |
| t810399 | Prostheco-microbium | 6 | Q75R | 831 | − | − |
| | hirschii | | | | | |
| t810600 | Prostheco-microbium | 6 | Q75T | 832 | − | − |
| | hirschii | | | | | |
| t809761 | Prostheco-microbium | 6 | I95L | 833 | − | − |
| | hirschii | | | | | |
| t810139 | Prostheco-microbium | 6 | 195M | 834 | − | − |
| | hirschii | | | | | |
| t809046 | Prostheco-microbium | 6 | 195V | 835 | − | − |
| | hirschii | | | | | |
| t810264 | Prostheco-microbium | 6 | V96C | 836 | − | − |
| | hirschii | | | | | |
| t810472 | Prostheco-microbium | 6 | V96I | 837 | − | − |
| | hirschii | | | | | |
| t809639 | Prostheco-microbium | 6 | V96T | 838 | − | − |
| | hirschii | | | | | |
| t810306 | Prostheco-microbium | 6 | L98A | 839 | − | − |
| | hirschii | | | | | |
| t809454 | Prostheco-microbium | 6 | L98C | 840 | − | − |
| | hirschii | | | | | |
| t808985 | Prostheco-microbium | 6 | L98I | 841 | − | − |
| | hirschii | | | | | |
| t809463 | Prostheco-microbium | 6 | L98M | 842 | − | − |
| | hirschii | | | | | |
| t809272 | Prostheco-microbium | 6 | L98T | 843 | − | − |
| | hirschii | | | | | |
| t809259 | Prostheco-microbium | 6 | L98V | 844 | − | − |
| | hirschii | | | | | |
| t810112 | Prostheco-microbium | 6 | T99N | 845 | − | − |
| | hirschii | | | | | |
| t810026 | Prostheco-microbium | 6 | T99S | 846 | − | − |
| | hirschii | | | | | |
| t809171 | Prostheco-microbium | 6 | T100C | 847 | − | − |
| | hirschii | | | | | |
| t810260 | Prostheco-microbium | 6 | T100N | 848 | − | − |
| | hirschii | | | | | |
| t815634 | Prostheco-microbium | 6 | T100S | 849 | − | − |
| | hirschii | | | | | |
| t809203 | Prostheco-microbium | 6 | T100V | 850 | − | − |
| | hirschii | | | | | |
| t809273 | Prostheco-microbium | 6 | I103C | 851 | − | − |
| | hirschii | | | | | |
| t809094 | Prostheco-microbium | 6 | I103M | 852 | − | − |
| | hirschii | | | | | |
| t810239 | Prostheco-microbium | 6 | V104G | 853 | − | − |
| | hirschii | | | | | |
| t810404 | Prostheco-microbium | 6 | V104R | 854 | − | − |
| | hirschii | | | | | |
| t810316 | Prostheco-microbium | 6 | D106N | 855 | − | − |
| | hirschii | | | | | |
| t809461 | Prostheco-microbium | 6 | L110I | 856 | − | − |
| | hirschii | | | | | |
| t810219 | Prostheco-microbium | 6 | F127H | 857 | − | − |
| | hirschii | | | | | |
| t809668 | Prostheco-microbium | 6 | F127L | 858 | − | − |
| | hirschii | | | | | |
| t810279 | Prostheco-microbium | 6 | F127Y | 859 | − | − |
| | hirschii | | | | | |
| t810099 | Prostheco-microbium | 6 | Y128H | 860 | + | − |
| | hirschii | | | | | |
| t815580 | Prostheco-microbium | 6 | T129G | 861 | − | − |
| | hirschii | | | | | |
| t810713 | Prostheco-microbium | 6 | T129K | 862 | − | − |
| | hirschii | | | | | |
| t815663 | Prostheco-microbium | 6 | T129M | 863 | − | − |
| | hirschii | | | | | |
| t809278 | Prostheco-microbium | 6 | T129V | 864 | − | − |
| | hirschii | | | | | |
| t810108 | Prostheco-microbium | 6 | T129Y | 865 | − | − |
| | hirschii | | | | | |
| t810451 | Prostheco-microbium | 6 | E169A | 866 | − | − |
| | hirschii | | | | | |
| t815599 | Prostheco-microbium | 6 | E169C | 867 | − | − |
| | hirschii | | | | | |
| t810308 | Prostheco-microbium | 6 | E169K | 868 | − | − |
| | hirschii | | | | | |
| t809398 | Prostheco-microbium | 6 | E169T | 869 | − | − |
| | hirschii | | | | | |
| t815681 | Prostheco-microbium | 6 | T199A | 870 | − | − |
| | hirschii | | | | | |
| t809601 | Prostheco-microbium | 6 | T199H | 871 | − | − |
| | hirschii | | | | | |
| t809303 | Prostheco-microbium | 6 | T199I | 872 | − | − |
| | hirschii | | | | | |
| t810247 | Prostheco-microbium | 6 | T199M | 873 | − | − |
| | hirschii | | | | | |
| t810366 | Prostheco-microbium | 6 | T199N | 874 | − | − |
| | hirschii | | | | | |
| t815696 | Prostheco-microbium | 6 | T199Q | 875 | − | − |
| | hirschii | | | | | |
| t809619 | Prostheco-microbium | 6 | T199S | 876 | − | − |
| | hirschii | | | | | |
| t809344 | Prostheco-microbium | 6 | T199V | 877 | − | − |
| | hirschii | | | | | |
| t809664 | Prostheco-microbium | 6 | T199W | 878 | − | − |
| | hirschii | | | | | |
| t810107 | Prostheco-microbium | 6 | T199Y | 879 | − | − |
| | hirschii | | | | | |
| t815669 | Prostheco-microbium | 6 | I200C | 880 | − | − |
| | hirschii | | | | | |
| t815641 | Prostheco-microbium | 6 | I200V | 881 | − | − |
| | hirschii | | | | | |
| t810229 | Prostheco-microbium | 6 | H201C | 882 | − | − |
| | hirschii | | | | | |
| t808381 | Prostheco-microbium | 6 | H201R | 883 | − | − |
| | hirschii | | | | | |
| t815695 | Prostheco-microbium | 6 | R204A | 884 | − | − |
| | hirschii | | | | | |
| t810028 | Prostheco-microbium | 6 | R204C | 885 | − | − |
| | hirschii | | | | | |
| t810318 | Prostheco-microbium | 6 | R204E | 886 | − | − |
| | hirschii | | | | | |
| t809480 | Prostheco-microbium | 6 | R204G | 887 | − | − |
| | hirschii | | | | | |
| t810429 | Prostheco-microbium | 6 | R204H | 888 | − | − |
| | hirschii | | | | | |
| t809103 | Prostheco-microbium | 6 | R204M | 889 | − | + |
| | hirschii | | | | | |
| t809493 | Prostheco-microbium | 6 | R204N | 890 | − | − |
| | hirschii | | | | | |
| t810695 | Prostheco-microbium | 6 | R204P | 891 | − | − |
| | hirschii | | | | | |
| t809258 | Prostheco-microbium | 6 | R204Y | 892 | − | − |
| | hirschii | | | | | |
| t809062 | Prostheco-microbium | 6 | I228L | 893 | − | − |
| | hirschii | | | | | |
| t809059 | Prostheco-microbium | 6 | I228M | 894 | − | − |
| | hirschii | | | | | |
| t810687 | Prostheco-microbium | 6 | I228V | 895 | − | − |
| | hirschii | | | | | |
| t809227 | Prostheco-microbium | 6 | G229C | 896 | − | − |
| | hirschii | | | | | |
| t809079 | Prostheco-microbium | 6 | G229N | 897 | − | + |
| | hirschii | | | | | |
| t810664 | Prostheco-microbium | 6 | G229S | 898 | − | − |
| | hirschii | | | | | |
| t809134 | Prostheco-microbium | 6 | G229T | 899 | − | − |
| | hirschii | | | | | |
| t810393 | Prostheco-microbium | 6 | M231C | 900 | + | − |
| | hirschii | | | | | |
| t809158 | Prostheco-microbium | 6 | M231I | 901 | − | − |
| | hirschii | | | | | |
| t809117 | Prostheco-microbium | 6 | M231L | 902 | − | − |
| | hirschii | | | | | |
| t809309 | Prostheco-microbium | 6 | M231V | 903 | − | − |
| | hirschii | | | | | |
| t809578 | Prostheco-microbium | 6 | D232E | 904 | − | − |
| | hirschii | | | | | |
| t815645 | Prostheco-microbium | 6 | D232G | 905 | − | − |
| | hirschii | | | | | |
| t808400 | Prostheco-microbium | 6 | D232N | 906 | − | − |
| | hirschii | | | | | |
| t809053 | Prostheco-microbium | 6 | L236F | 907 | − | − |
| | hirschii | | | | | |
| t809178 | Prostheco-microbium | 6 | L236I | 908 | − | − |
| | hirschii | | | | | |
| t809503 | Prostheco-microbium | 6 | L236M | 909 | − | − |
| | hirschii | | | | | |
| t810292 | Prostheco-microbium | 6 | L236W | 910 | − | − |
| | hirschii | | | | | |
| t809513 | Prostheco-microbium | 6 | V251L | 911 | − | − |
| | hirschii | | | | | |
| t809469 | Prostheco-microbium | 6 | V251M | 912 | − | − |
| | hirschii | | | | | |
| t809156 | Prostheco-microbium | 6 | E252A | 913 | − | − |
| | hirschii | | | | | |
| t810206 | Prostheco-microbium | 6 | E252G | 914 | − | − |
| | hirschii | | | | | |
| t810437 | Prostheco-microbium | 6 | E252N | 915 | − | − |
| | hirschii | | | | | |
| t810149 | Prostheco-microbium | 6 | E252Q | 916 | − | − |
| | hirschii | | | | | |
| t810256 | Prostheco-microbium | 6 | E252S | 917 | − | − |
| | hirschii | | | | | |
| t815691 | Prostheco-microbium | 6 | D254N | 918 | − | − |
| | hirschii | | | | | |
| t815712 | Prostheco-microbium | 6 | F255M | 919 | − | − |
| | hirschii | | | | | |
| t809805 | Prostheco-microbium | 6 | F255W | 920 | − | − |
| | hirschii | | | | | |
| t808977 | Prostheco-microbium | 6 | F255Y | 921 | − | − |
| | hirschii | | | | | |
| t809207 | Prostheco-microbium | 6 | I258F | 922 | − | − |
| | hirschii | | | | | |
| t810145 | Prostheco-microbium | 6 | I258H | 923 | − | − |
| | hirschii | | | | | |
| t810289 | Prostheco-microbium | 6 | I258K | 924 | − | − |
| | hirschii | | | | | |
| t809337 | Prostheco-microbium | 6 | I258L | 925 | − | − |
| | hirschii | | | | | |
| t809476 | Prostheco-microbium | 6 | I258N | 926 | − | − |
| | hirschii | | | | | |
| t810175 | Prostheco-microbium | 6 | I258P | 927 | − | − |
| | hirschii | | | | | |
| t809793 | Prostheco-microbium | 6 | I258V | 928 | + | + |
| | hirschii | | | | | |
| t810483 | Prostheco-microbium | 6 | I258W | 929 | − | − |
| | hirschii | | | | | |
| t809097 | Prostheco-microbium | 6 | I270C | 930 | − | − |
| | hirschii | | | | | |
| t809458 | Prostheco-microbium | 6 | I270H | 931 | − | − |
| | hirschii | | | | | |
| t809379 | Prostheco-microbium | 6 | I270L | 932 | − | − |
| | hirschii | | | | | |
| t810338 | Prostheco-microbium | 6 | I270P | 933 | − | − |
| | hirschii | | | | | |
| t809265 | Prostheco-microbium | 6 | I270V | 934 | − | − |
| | hirschii | | | | | |
| t809962 | Prostheco-microbium | 6 | S295A | 935 | − | − |
| | hirschii | | | | | |
| t809279 | Prostheco-microbium | 6 | H296C | 936 | − | − |
| | hirschii | | | | | |
| t810517 | Prostheco-microbium | 6 | H296M | 937 | − | − |
| | hirschii | | | | | |
| t809280 | Prostheco-microbium | 6 | H296N | 938 | − | − |
| | hirschii | | | | | |
| t809564 | Prostheco-microbium | 6 | H296Q | 939 | − | − |
| | hirschii | | | | | |
| t809246 | Prostheco-microbium | 6 | H296T | 940 | − | − |
| | hirschii | | | | | |
| t810391 | Prostheco-microbium | 6 | D297G | 941 | − | − |
| | hirschii | | | | | |
| t809318 | Prostheco-microbium | 6 | D297N | 942 | − | − |
| | hirschii | | | | | |
| t809598 | Prostheco-microbium | 6 | D297S | 943 | − | − |
| | hirschii | | | | | |
| t810143 | Prostheco-microbium | 6 | I298M | 944 | − | − |
| | hirschii | | | | | |
| t810093 | Prostheco-microbium | 6 | I298V | 945 | − | − |
| | hirschii | | | | | |
| t815706 | Prostheco-microbium | 6 | C299A | 946 | − | − |
| | hirschii | | | | | |
| t809586 | Prostheco-microbium | 6 | C299F | 947 | − | − |
| | hirschii | | | | | |
| t809902 | Prostheco-microbium | 6 | C299G | 948 | − | − |
| | hirschii | | | | | |
| t809351 | Prostheco-microbium | 6 | C299H | 949 | − | − |
| | hirschii | | | | | |
| t809172 | Prostheco-microbium | 6 | C299M | 950 | − | − |
| | hirschii | | | | | |
| t810364 | Prostheco-microbium | 6 | C299S | 951 | − | − |
| | hirschii | | | | | |
| t810034 | Prostheco-microbium | 6 | C299T | 952 | − | − |
| | hirschii | | | | | |
| t810182 | Prostheco-microbium | 6 | C299W | 953 | − | − |
| | hirschii | | | | | |
| t815592 | Prostheco-microbium | 6 | R303Q | 954 | − | + |
| | hirschii | | | | | |
| t809208 | Prostheco-microbium | 6 | Y312F | 955 | − | − |
| | hirschii | | | | | |
| t810278 | Prostheco-microbium | 6 | (N/A) | 956 | − | − |
| | hirschii | | | | | |

[0271] The results indicated that PTEs comprising the following amino acid substitutions relative to SEQ ID NO: 1 were found to be active against VX and VR: V25M, I27F, I27M, I27T, V66I, L68N, L68M, L68C, 169S, V70P, V70C, V70T, L144I, A147G, A147F, T148V, T148C, T148M, V164I, S176T, S176M, S176V, S176C, S176Y, S176I, T177C, T179C, T179S, A181P, A181S, A181C, S208T, S208A, G228S, H263M, H263S, H263C, H263T, H263N, A265C, A265T, A265F, A265W, A265M, N266S, N266M, N266T, N266G, N266A, C267A, C267T, C267W, W284D, W284H, W284C, W284N, W284Y, Y286M, and Y286W.

[0272] PTEs comprising the following amino acid substitutions relative to SEQ ID NO: 2 were found to be active against VX and VR: S2K, S2T, S2A, E3K, E3T, E3Q, L4I L4V, N5R, N5Q, N5M, R8L, R8T, R8C, S10P, D12E, D12P, T13P, T13A, A14S, A14E, A14D, A15D, A15Q, A15E, L16M, V18M, V18I, M28D, T29S, T30S, 130W, T30P, E31G, I32V, 132M, I32W, I32F, A33W, E34Q, N35D, Y36F, Y36W, Y36H, E38D, A39P, W40F, D42N, E43D, D44E, D44N, V47I, V47M, A48E, A48W, D49H, D49W, D49C, D49M, V51I, V51L, K52R, R53Q, R53E, N55K, E56D, E56R, E56Q, L57F, A59E, A59Q, R60A, R60H, D63N, T64S, G72D, Y76N, Y76D, I77V, P78D, P78E, I80L, I80M, I80V, A81R, R82K, R82E, V83L, V83I, A84S, A85E, A85R, E86R, T87S, E88G, L89V, L89M, N90H, I91V, V92I, V93C, T99C, V103W, V103Y, V103H, M105W, Y106F, Y106H, Y106W, F107Y, F107W, F107M, Y109W, Y109F, L110M, L110W, E115D, G118T, G118S, E120D, I121Q, I121E, M122L, M122I, T123A, D124E, V127I, R128H, R128N, Q132D, Q132E, I134V, A135E, A135G, D136G, I139V, K140H, K140R, T150Y, T150S, T150H, P151W, P151H, P151N, P151D, V153I, P155E, P155D, G156W, E158H, A165C, Q166R, H168Q, G182D, L183T, L187H, L187M, L187F, E188W, Q190I, Q190L, K191R, F193L, E194D, E195D, L200P, S201N, R202H, R202K, V203C, V2031, 1214M, G215E, G215D, E219D, L220I, L220M, L220V, I221M, I221C, I221A, A222H, A223R, S225C, Y226W, L227V, L227I, D235C, A236H, A236W, A236K, L238M, L238H, P239S, F240W, F240D, F240Y, E241D, D242E, V244C, N245D, N245E, N245R, T246M, T246L, V247I, V247L, Q249E, Q249W, Q249R, Q249H, M250L, C251I, C251V, E252H, R253N, H255Y, H255W, K258H, K258R, M259I, A271G, L272H, L272W, L272M, D274G, D274W, E275K, V277W, S278R, Q279K, Q279R, Q279H, M281Y, M281F, P282G, N283D, N283G, H285G, L287T, H288F, H288Y, 1289L, I289V, H290F, H290L, N291R, N291D, N291T, N291E, D292N, D292R, V293I, I294L, I294V, A296M, K298M, K298R, E299Q, E299K, E299R, R300A, T303S, T303D, D304E, D304Q, E305D, E305A, Q306D, Q306E, L307I, L307V, H308R, H308E, H308N, T309Q, T309K, T309R, L311M, L311F, L311T, V312I, D313E, R316A, R316K. R316Q, R317K, R317N, I318M, I318F, I318L, E320S, E320Q, E320D, Q322R, Q322E, Q322K, A324P, A324S, Y325W, Y325F, Y325H, E326Q, E326R, and E326K.

[0273] PTEs comprising the following amino acid substitutions relative to SEQ ID NO: 3 were found to be active against VX and VR: V25A, V25T, V25I, I27F, I27T, I27M, I27L, L68N, L68P, L68Q, L68M, T69S, V70P, V70C, Y100E, Y100H, Y100D, Y100Q, L144I, C146V, C146I, A147C, T148I, T148A, T148V, V164I, S176L, S176H, S176V, S176C, S176I, S176Y, S176F, T177C, H178D, T179C, A181S, Q189M, Q189V, Q189A, Q189I, Q189C, G206S, S208A, S208T, S208C, G209N, G228S, V260I, S262G, H263M, H263G, H263T, H263Q, A265T, A265S, A265M, A265W, N266L, N266I, N266G, N266T, N266A, N266C, N266Q, C267T, C267W, W284E, and W284T.

[0274] PTEs comprising the following amino acid substitutions relative to SEQ ID NO: 4 were found to be active against VX and VR: L20M, V25L, V25M, F26W, F26H, I27M, I27F, I27V, I27T, V66I, L68N, L68M, L68C, Y98W, F126M, L144I, C146V, A147I, A147G, A147S, A147M, T148M, T148C, T148I, T148V, V164T, V164I, H168S, V173C, S176T, S176M, S176H, H178D, A181S, A181G, Q189M, Q189V, Q189C, I204V, G206S, S208C, S208T, G209N, V260I, S262G, H263S, H263C, H263T, H263N, A265L, A265Q, A265T, A265S, A265Y, A265W, N266C, N266G, N266S, N266T, N266A, C267W, C267A, C267T, C267G, W284H, W284Y, W284M, W284F, W284N, Y286F, Y286M, and Y286W.

[0275] PTERs comprising the following amino acid substitution relative to SEQ ID NO: 6 were found to be active against VX and VR: I258V.

[0276] PTERs comprising the following amino acid substitutions relative to SEQ ID NO: 6 were found to be active against VX: Y128H and M231C.

[0277] PTERs comprising the following amino acid substitutions relative to SEQ ID NO: 6 were found to be active against VR: R204M, G229N, and R303Q.

### Example 3: OPNA-Active Human PTER

[0278] Human PTER (corresponding to UniProt Accession No. Q96BW5 and SEQ ID NO: 9) is not known to exhibit activity against VX, VR, other V-agents, or any OPNAs or phosphono esters or phospho esters.

[0279] In an attempt to identify human PTERs with improved activity against one or more OPNAs, the following table provides human PTERs that are created using: (1) Brevundimonas diminuta PTE, specifically variant “C23” (Goldsmith, 2016; PDB entry 6G3M), which exhibits very high activity against both VX and VR; (2) Proteus mirabilis hi4320 PTER (corresponding to UniProt Accession No. B4EXV8; PDB entry 3RHG), which exhibits very high activity against certain methylphosphono esters (Xiang et al. (2015) Biochemistry 54:2919-2930. doi: 10.1021/acs.biochem.5b00199); and (3) a PTER corresponding to SEQ ID NO: 928, described herein as expressed in strain t809793, which is a 1258V substitution mutant of Prosthecomicrobium hirschii PTER (corresponding to UniProt Accession No. AOAOP6VJM8 and SEQ ID NO: 6).

TABLE 8
Human PTER mutations to be screened for improved
activity against one or more V-agents.

| Human PTER | | | |
|---|---|---|---|
| Position | | Corresponding Residue | |
| (relative to | | | P. mirabilis |
| SEQ ID NO: 9) | Mutation(s) | C23 PTE | PTER |
| 31 | M31G | G60 | N28 |
| 98 | N98V | V101 | A95 |
| 31-75 | M31-Q75 replaced by | G60-L79 | N28-P73 |
| | C23 G60-L79 | | |
| 128 | Y128W | W131 | Y126 |
| 129 | V129E | E132 | I127 |
| 168, 169 | G168del*, E169K | K169 | G165, E166 |
| 200 | I200H | H201 | H199 |
| 201 | H201T | T202 | M200 |
| 229 | S229G | G229 | A228 |
| 231 | L231S | S231 | S230 |
| 233 | R233D | D233 | P232 |
| 255 | L255G | G254 | M254 |
| 171, 173 | G171A, S173N | A171, N173 | G168, S170 |
| 174, 175 | W174, P175 | G174, K175 | P171, F172 |
| 228, 244 | M228I, F244L | I228, L243 | L227, M243 |
| 299-311 | I299W-H311 replaced by | W302-D323 | V295-N307 |
| | C23 W302-D323 | | |

*“del” indicates that this human PTER residue is deleted.

[0280] The human PTER amino acid residue ranges provided in this example are approximate; that is, they are to be read and understood as the given residue range plus or minus 0, 1, 2, or 3 residues at either (or both) end(s) of the given residue range.

[0281] OPNA-active human PTER variants are created by mutating human PTER with any one or more the specific mutations enumerated in Table 8.

[0282] OPNA-active human PTER variants are also created by replacing, in whole or in part, a human PTER core beta-strand region (defined approximately as residue ranges R22-H28, G93-T100, V119-V129, 1166-S173, C196-P202, K225-D232, C249-F256, and R292-H300) by the corresponding core beta-strand region sequence of C23 PTE, P. mirabilis PTER, or a mixture thereof. One or more of the eight core beta-strand regions are so replaced, i.e. any one beta-strand, any combination of two beta-strands, etc., up to and including replacement of all eight beta-strands.

[0283] These core beta-strand region replacements may also be combined with one or more of the specific mutations enumerated in Table 8.

[0284] OPNA-active human PTER variants are also created by replacing, in whole or in part, a human PTER core alpha-helix region (defined approximately as residue ranges Q75-G91, A106-G118, S141-G156, T177-T187, R207-G220, D237-G248, D273-G288, and S314-G328) by the corresponding core alpha-helix region sequence of C23 PTE and/or P. mirabilis PTER, or mixture thereof. Any combination of these eight core alpha-helix regions are so replaced, i.e. any one alpha-helix, any combination of two alpha-helices, etc., up to and including replacement of all eight alpha-helices.

[0285] These core alpha-helix region replacements may also be combined with one or more of the specific mutations enumerated in Table 8.

[0286] OPNA-active human PTER variants are also created by replacing, in whole or in part, a human PTER sequence-contiguous other region, for example a beta-strand, alpha-helix, or loop region not specifically enumerated above, by the corresponding region sequence of C23 PTE, P. mirabilis PTER, or mixture thereof. Any combination of these regions are so replaced, i.e. any one region, any combination of two regions, etc., up to and including replacement of all such regions. These region replacements may also be combined with one or more of the specific mutations enumerated in Table 8.

[0287] OPNA-active human PTER variants are also created by combining one or more of the specific mutations enumerated in Table 8 with one or more of the three types (core beta-strand; core alpha-helix; or other) of regions enumerated above.

[0288] OPNA-active human PTER variants are also created as described above, wherein C23 PTE and/or P. mirabilis PTER are instead replaced by any other PTE and/or PTER that exhibits measurable activity in the hydrolysis of V-agents, G-agents, A-agents, other OPNAs, and/or other (thio)phosphino esters, (thio)phosphono esters, and/or (thio)phosphoro esters.

### Example 4: Engineering Human and Non-Human Cells that Express OPNA Hydrolyzing Enzymes

[0289] The OPNA hydrolyzing enzymes associated with the disclosure are expressed in or on human cells, genetically engineered human cells, or human-derived cell lines using methods known in the art. Nucleotide sequences are codon optimized for expression in human cells. In some embodiments, RNAs are constructed using non-natural nucleosides such as N-methyl-pseudouridine. Optimized nucleotide sequences are incorporated into a suitable expression vector. Expression vectors are known in the art and can include, for example, one or more gene promoter sequence(s), one or more gene enhancer sequence(s), and/or one or more internal ribosomal entry site(s). Expression vectors with optimized PTE or PTER nucleotide sequences are introduced into a human cell, engineered human cell or a human-derived cell line using methods known to those of skill in the art to generate transformed cells expressing a PTE or PTER. Such methods include, for example, cationic lipofection, calcium phosphate transfection, electroporation, use of lentivirus or adenovirus or adenovirus-associated virus or vesicular stomatitis virus or other such well-known viral vectors, or similar well-known nucleic acid transfection methods. In some cases, the PTE or PTER nucleotide sequence or expression vector comprising the PTE or PTER nucleotide sequence used is responsive to physiological or artificially applied signals such that expression of the OPNA hydrolyzing enzyme is controlled, for example, by application of well-known molecules such as tetracycline or rapamycin, or by altering the temperature of the cells.

### Example 5: Identification of Engineered OPNA Hydrolyzing Enzymes Described in Example 2 that have High Activity Against VX and/or VR Nerve Agents

[0290] A subset of the PTE and PTER mutants described in Example 2 were screened to identify the ones most active on VX and/or VR nerve agents. This Example describes the experimental design, general protocol, and results of this screen.

### Experimental Design

[0291] A colorimetric assay was used to measure the hydrolysis of V-type nerve agents. Hydrolysis of V-type nerve agents creates a free thiol that rapidly reacts with 5,5,-dithio-bi-(2-nitrobenzoic acid) (DTNB) in a 1:1 molar ratio, generating 2-nitro-5-thiobenzoate (TNB). TNB absorbs at 412 nm, so the hydrolysis of V-type nerve agents can be indirectly measured in real-time in a spectrophotometer.

### General Protocol

[0292] Racemic nerve agents VX and VR were issued in saline at the following concentrations: 0.716 μg/μL (VX) and 0.799 μg/μL (VR).

[0293] Enzymes were removed from storage at −80° C. and thawed slowly on ice. Two test plates were created by transferring 25 μL of each enzyme variant (Table 9) to two new 96-well microplates (VX Test Plate and VR Test Plate). Samples were run in duplicate. The test plates were briefly stored at 4° C. until used in the assay.

[0294] Aliquots of 20 mM DTNB (Sigma; St. Louis, MO) in 0.1 M KPO₄ buffer were removed from storage at −20° C. and thawed on ice. DTNB was diluted to 8 mM in 50 mM HEPES pH 7.6, 137 mM NaCl, 2.7 mM KCl, 1 mM CoCl₂. VX Test Plate was removed from storage at 4° C. and allowed to warm to room temperature for 10 minutes. During the 10 minute warming period, 45 μL of 8 mM DTNB was added to each well. Once the plate equilibrated to room temperature, 50 μL of VX was added to each well. Immediately following the addition of VX, the plate was read at 412 nm in 10 second intervals for a total duration of 5 minutes in a SpectraMax Plus 384 microplate reader (Molecular Devices; San Jose, CA). Raw values (mOD412/min) were generated using the plate reader software (SoftMax v 5.4) to calculate the slope of the linear portion of the curve. The same procedure was repeated with VR Test Plate using 50 μL of VR instead of VX.

[0295] V-Activity Values were calculated for each enzyme variant tested, and enzymes with activity values greater than 20 were re-run with varying concentrations of V-agent (Michaelis-Menten kinetics). For this assay, the above protocol was repeated with the exception that each enzyme was tested against an 8 step 2-fold serial dilution of V-agent. Enzymes were tested in singlet due to the large volume of enzyme required for the assay.

[0296] Raw absorbance values in mOD412/min were divided by 1000 and converted to OD₄₁₂/min. These absorbance values were used to calculate the concentration in mol/min using Beer's law (A=εlc). The molar extinction coefficient (6) for TNB is 13,600 M⁻¹ cm⁻¹ and the pathlength (1) is 0.3572 cm. The reaction volume in the well is 0.00012 L. The concentration in mol/min was then converted to nmol/min.

[0297] Each plate contained 8 background control wells. These wells were used to determine background levels for each plate assay and were subtracted from the Raw Values to generate the Background Removed Values.

[0298] To normalize the enzymatic activities, the activity values were calculated per μg of protein in each reaction. Activity values that were negative are reported as 0.00. The V-Activity Values (mOD₄₁₂/min/μg) were calculated using the following equation: V-Activity Value=(mOD412/min value/μg of Enzyme Variant) The following table provides the VR and VX activities of a subset of engineered enzymes initially screened in Example 2, the point mutation in each engineered enzyme relative to the enzyme template, and the source organism of each enzyme template.

TABLE 9
V-agent hydrolyzing activities of top PTEs and PTERs

| | | | | | | VR | VX |
|---|---|---|---|---|---|---|---|
| | | | Mutation | PTE or | | Activity | Activity |
| | Source organism of | Template | (relative | PTER | | Value | Value |
| | template PTE or | SEQ ID | to | SEQ ID | # of | (mOD412/ | (mOD412/ |
| Strain ID | PTER | NO: | Template) | NO: | Replicates | min/μg) | min/μg) |
| t339870 | N/A | N/A | N/A | N/A | 6 | 0.01 | 0.00 |
| (negative | | | | | | | |
| control) | | | | | | | |
| t402006 | B. diminuta variant | N/A | N/A | 5 | 6 | 3.61 | 1.65 |
| | G1-C74 | | | | | | |
| t808375 | Mycobacterium | 2 | T29S | 199 | 2 | 0.99 | 6.03 |
| | colombiense | | | | | | |
| t808406 | Mycobacterium | 2 | A236K | 368 | 2 | 1.99 | 6.47 |
| | colombiense | | | | | | |
| t809079 | Prostheco- | 6 | G229N | 897 | 2 | 0.11 | 0.01 |
| | microbium hirschii | | | | | | |
| t809345 | Prostheco- | 6 | Q75K | 830 | 2 | 0.26 | 0.00 |
| | microbium hirschii | | | | | | |
| t809349 | Mycobacterium | 3 | N266L | 617 | 2 | 42.93 | 37.21 |
| | asiaticum | | | | | | |
| t809656 | Mycobacterium | 3 | A265Y | 611 | 2 | 48.34 | 8.56 |
| | asiaticum | | | | | | |
| t809674 | Mycobacterium | 4 | A265Y | 768 | 2 | 22.25 | 3.25 |
| | gordonae | | | | | | |
| t809682 | Mycobacterium | 4 | T148V | 676 | 2 | 1.83 | 2.50 |
| | gordonae | | | | | | |
| t809729 | Mycobacterium | 2 | H285G | 420 | 2 | 7.51 | 3.01 |
| | colombiense | | | | | | |
| t809774 | Mycobacterium | 4 | N266T | 775 | 2 | 9.91 | 7.38 |
| | gordonae | | | | | | |
| t809936 | Mycobacterium | 2 | L272W | 405 | 2 | 2.46 | 6.72 |
| | colombiense | | | | | | |
| t809996 | Mycobacterium | 2 | P151W | 319 | 2 | 5.24 | 17.87 |
| | colombiense | | | | | | |
| t810027 | Mycobacterium sp. | 1 | A265Y | 147 | 2 | 46.98 | 5.52 |
| | 852014- | | | | | | |
| | 52450_SCH5900713 | | | | | | |
| t810083 | Mycobacterium sp. | 1 | W284H | 160 | 2 | 34.30 | 2.51 |
| | 852014- | | | | | | |
| | 52450_SCH5900713 | | | | | | |
| t810099 | Prostheco- | 6 | Y128H | 860 | 2 | 0.34 | 0.00 |
| | microbium hirschii | | | | | | |
| t810152 | Mycobacterium sp. | 1 | N266M | 150 | 2 | 29.18 | 15.38 |
| | 852014- | | | | | | |
| | 52450_SCH5900713 | | | | | | |
| t810304 | Mycobacterium sp. | 1 | N266G | 149 | 2 | 11.10 | 8.31 |
| | 852014- | | | | | | |
| | 52450_SCH5900713 | | | | | | |
| t810393 | Prostheco- | 6 | M231C | 900 | 2 | 0.32 | 0.00 |
| | microbium hirschii | | | | | | |
| t810398 | Mycobacterium | 3 | Y100D | 522 | 2 | 15.48 | 49.64 |
| | asiaticum | | | | | | |
| t810450 | Mycobacterium | 2 | T99C | 275 | 2 | 3.74 | 10.81 |
| | colombiense | | | | | | |
| t810455 | Mycobacterium sp. | 1 | C267W | 156 | 2 | 3.86 | 3.22 |
| | 852014- | | | | | | |
| | 52450_SCH5900713 | | | | | | |
| t810567 | Mycobacterium | 4 | A265M | 762 | 2 | 5.56 | 0.80 |
| | gordonae | | | | | | |
| t810588 | Mycobacterium | 2 | V103H | 276 | 2 | 3.75 | 9.26 |
| | colombiense | | | | | | |
| t810666 | Mycobacterium | 2 | L272C | 402 | 2 | 2.19 | 20.63 |
| | colombiense | | | | | | |
| t810670 | Mycobacterium | 4 | C267W | 779 | 2 | 0.45 | 0.58 |
| | gordonae | | | | | | |
| t810692 | Mycobacterium | 3 | N266I | 616 | 2 | 32.84 | 21.95 |
| | asiaticum | | | | | | |
| t815551 | Mycobacterium | 4 | W284H | 784 | 2 | 16.57 | 1.52 |
| | gordonae | | | | | | |
| t815554 | Mycobacterium | 2 | M281Y | 416 | 2 | 2.07 | 8.12 |
| | colombiense | | | | | | |
| t815592 | Prostheco- | 6 | R303Q | 954 | 2 | 0.58 | 0.00 |
| | microbium hirschii | | | | | | |
| t815643 | Mycobacterium | 3 | W284H | 624 | 2 | 11.59 | 0.99 |
| | asiaticum | | | | | | |

[0299] The results confirmed that PTEs comprising the following amino acid substitutions relative to SEQ ID NO: 1 were found to be active against VX and/or VR: A265Y, N266G, N266M, C267W, and W284H.

[0300] The results confirmed that PTEs comprising the following amino acid substitutions relative to SEQ ID NO: 2 were found to be active against VX and/or VR: T29S. T99C, V103H, P151W, A236K, L272C, L272W, M281Y, and H285G.

[0301] The results confirmed that PTEs comprising the following amino acid substitutions relative to SEQ ID NO: 3 were found to be active against VX and/or VR: Y100D, A265Y, N266I, N266L, and W284H.

[0302] The results confirmed that PTEs comprising the following amino acid substitutions relative to SEQ ID NO: 4 were found to be active against VX and/or VR: T148V, A265M, A265Y, N266T, C267W, and W284H.

[0303] The results confirmed that PTEs comprising the following amino acid substitution relative to SEQ ID NO: 6 was found to be active against VX and/or VR: G229N.

### Example 6: Identification of OPNA Hydrolyzing Enzymes that Hydrolyze GB and/or GD Nerve Agents

[0304] A subset of the PTE and PTER mutants with V-agent hydrolyzing activity as described in in Example 2 were screened to investigate whether they could also hydrolyze GB and/or GD nerve agents (FIGS. 4A-4B and FIG. 6). This Example describes the experimental design, general protocol, and results of the screen.

### Experimental Design

[0305] A colorimetric assay was used to measure the hydrolysis of G-type nerve agents. For G-type nerve agents, hydrolysis of acetylthiocholine by acetylcholinesterase (AChE) produces the free thiol that rapidly reacts with DTNB and generates TNB. For this assay, enzyme samples were incubated with the G-type agent. This incubation allows the enzyme to noncompetitively hydrolyze the compound before the addition of AChE. Any remaining compound will bind to and inhibit AChE, resulting in less acetylthiocholine hydrolysis and thereby, less production of TNB. Like the V-agent assay (Example 5), production of TNB was monitored at 412 nm using a spectrophotometer.

### General Protocol

[0306] Enzymes were removed from storage at −80° C. and thawed slowly on ice. Two test plates were created by transferring 50 μL of each enzyme variant to two 96-well microplates (GB Test Plate and GD Test Plate). Samples were run in singlet. Several empty wells on the dilution plate were designated to serve as internal “Inhibited AChE” and “Uninhibited AChE” controls. Either 50 μL (Inhibited AChE wells) or 60 μL (Uninhibited AChE wells) of buffer (50 mM HEPES pH 7.6, 137 mM NaCl, 2.7 mM KCl, 1 mM CoCl₂) was added to the internal control wells. The test plates were briefly stored at 4° C. until used in the assay.

[0307] Racemic G-agents were issued in saline and diluted in 50 mM HEPES pH 7.6, 137 mM NaCl, 2.7 mM KCl, 1 mM CoCl₂. GD was diluted to a concentration of 20.2 μg/L, and GB was diluted to a concentration of 33.8 μg/L. Purified human AChE (Allotropic Tech; Halethorpe, MD) was diluted to 8 μM in 0.1 M potassium phosphate (KPO₄) buffer, pH 7.4, +0.1% bovine serum albumin. Before the addition of the agent, a test plate was removed from 4° C. and allowed to warm to room temperature for 5 minutes. Once the test plate had equilibrated to room temperature, 10 μL of the diluted nerve agent was added to all wells except the “Uninhibited AChE” control wells. The plate was covered and incubated for 10 minutes at room temperature. After the incubation, 40 μL of dilute AChE was added to each well of the plate. The plate was covered and incubated for an additional 10 minutes at room temperature. Following the second incubation, 20 μL of each 100 μL reaction volume was transferred to a new plate and 180 μL of substrate [0.5 mM acetylthiocholine (Sigma; St. Louis, MO) and 1 mM DTNB (Sigma) in 0.1 M KPO₄ buffer, pH 7.4] was added to each well of the new plate. The plate was read at 412 nm in 10-second intervals for a total duration of 5 minutes in a SpectraMax Plus 384 microplate reader (Molecular Devices; San Jose, CA). Raw data (mOD412/min) were generated using the plate reader software (SoftMax v 5.4) to calculate the slope of the linear portion of the curve.

[0308] The % Activity Remaining was calculated for each sample using the following equation:

% Activity Remaining=Raw Data/(Average of “Uninhibited AChE Control” Raw Data)

[0309] 100% Activity Remaining was set to equal the “Uninhibited AChE Control” average for each plate. For this assay, the “Inhibited AChE Control” has about 5-10% Activity Remaining, allowing for a large range between maximum and minimum % Activity Remaining values. The PIE expressed by positive control strain t402006 had the greatest % Activity Remaining against both GB and GD.

[0310] The following table provides the GB and GD activities of a subset of engineered enzymes described Example 2, the point mutation in each engineered enzyme relative to the enzyme template, and the source organism of each enzyme template.

TABLE 10
G-agent hydrolyzing activities of top PTEs and PTERs

| | | | Mutation | PTE or | | | |
|---|---|---|---|---|---|---|---|
| | Source organism of | Template | (relative | PTER | | GB | GD |
| | template PTE or | SEQ ID | to | SEQ ID | # of | Percent | Percent |
| Strain ID | PTER | NO: | Template) | NO: | Replicates | Activity | Activity |
| Uninhibited | N/A | N/A | N/A | N/A | 8 | 100.00% | 100.00% |
| Inhibited | N/A | N/A | N/A | N/A | 4 | 5.90% | 6.60% |
| t339870 | N/A | N/A | N/A | 20 | 3 | 8.80% | 12.20% |
| t402006 | B. diminuta variant | N/A | N/A | 5 | 3 | 85.20% | 36.70% |
| | G1-C74 | | | | | | |
| t808375 | Mycobacterium | 2 | T29S | 199 | 1 | 8.30% | 8.40% |
| | colombiense | | | | | | |
| t808406 | Mycobacterium | 2 | A236K | 368 | 1 | 9.90% | 10.00% |
| | colombiense | | | | | | |
| t809079 | Prostheco- | 6 | G229N | 897 | 1 | 7.50% | 10.90% |
| | microbium hirschii | | | | | | |
| t809345 | Prostheco- | 6 | Q75K | 830 | 1 | 6.90% | 7.50% |
| | microbium hirschii | | | | | | |
| t809349 | Mycobacterium | 3 | N266L | 617 | 1 | 11.20% | 10.00% |
| | asiaticum | | | | | | |
| t809656 | Mycobacterium | 3 | A265Y | 611 | 1 | 7.20% | 7.70% |
| | asiaticum | | | | | | |
| t809674 | Mycobacterium | 4 | A265Y | 768 | 1 | 7.70% | 13.70% |
| | gordonae | | | | | | |
| t809682 | Mycobacterium | 4 | T148V | 676 | 1 | 7.00% | 12.60% |
| | gordonae | | | | | | |
| t809729 | Mycobacterium | 2 | H285G | 420 | 1 | 9.60% | 13.80% |
| | colombiense | | | | | | |
| t809774 | Mycobacterium | 4 | N266T | 775 | 1 | 9.10% | 12.40% |
| | gordonae | | | | | | |
| t809936 | Mycobacterium | 2 | L272W | 405 | 1 | 20.50% | 11.50% |
| | colombiense | | | | | | |
| t809996 | Mycobacterium | 2 | P151W | 319 | 1 | 13.60% | 21.50% |
| | colombiense | | | | | | |
| t810027 | Mycobacterium sp. | 1 | A265Y | 147 | 1 | 8.30% | 18.90% |
| | 852014- | | | | | | |
| | 52450_SCH5900713 | | | | | | |
| t810083 | Mycobacterium sp. | 1 | W284H | 160 | 1 | 10.00% | 11.10% |
| | 852014- | | | | | | |
| | 52450_SCH5900713 | | | | | | |
| t810099 | Prostheco- | 6 | Y128H | 860 | 1 | 10.60% | 10.10% |
| | microbium hirschii | | | | | | |
| t810152 | Mycobacterium sp. | 1 | N266M | 150 | 1 | 15.50% | 16.30% |
| | 852014- | | | | | | |
| | 52450_SCH5900713 | | | | | | |
| t810304 | Mycobacterium sp. | 1 | N266G | 149 | 1 | 10.80% | 13.50% |
| | 852014- | | | | | | |
| | 52450_SCH5900713 | | | | | | |
| t810393 | Prostheco- | 6 | M231C | 900 | 1 | 10.20% | 11.20% |
| | microbium hirschii | | | | | | |
| t810398 | Mycobacterium | 3 | Y100D | 522 | 1 | 6.50% | 14.00% |
| | asiaticum | | | | | | |
| t810450 | Mycobacterium | 2 | T99C | 275 | 1 | 12.40% | 14.60% |
| | colombiense | | | | | | |
| t810455 | Mycobacterium sp. | 1 | C267W | 156 | 1 | 14.50% | 10.30% |
| | 852014- | | | | | | |
| | 52450_SCH5900713 | | | | | | |
| t810567 | Mycobacterium | 4 | A265M | 762 | 1 | 6.50% | 8.80% |
| | gordonae | | | | | | |
| t810588 | Mycobacterium | 2 | V103H | 276 | 1 | 13.40% | 16.20% |
| | colombiense | | | | | | |
| t810666 | Mycobacterium | 2 | L272C | 402 | 1 | 18.50% | 14.30% |
| | colombiense | | | | | | |
| t810670 | Mycobacterium | 4 | C267W | 779 | 1 | 6.00% | 14.10% |
| | gordonae | | | | | | |
| t810692 | Mycobacterium | 3 | N266I | 616 | 1 | 13.00% | 8.80% |
| | asiaticum | | | | | | |
| t815551 | Mycobacterium | 4 | W284H | 784 | 1 | 7.50% | 12.60% |
| | gordonae | | | | | | |
| t815554 | Mycobacterium | 2 | M281Y | 416 | 1 | 10.20% | 14.90% |
| | colombiense | | | | | | |
| t815592 | Prostheco- | 6 | R303Q | 954 | 1 | 6.60% | 8.50% |
| | microbium hirschii | | | | | | |
| t815643 | Mycobacterium | 3 | W284H | 624 | 1 | 9.60% | 11.40% |
| | asiaticum | | | | | | |

[0311] Results indicate that PTEs comprising the following amino acid substitutions relative to SEQ ID NO: 1 were found to be active against GB and/or GD: A265Y, N266G, N266M, C267W, and W284H.

[0312] Results indicate that PTEs comprising the following amino acid substitutions relative to SEQ ID NO: 2 were found to be active against GB and/or GD: T29S, T99C, V1031H, P151W, A236K, L272C, L272W, M281Y, and H285G.

[0313] Results indicate that PTEs comprising the following amino acid substitutions relative to SEQ ID NO: 3 were found to be active against GB and/or GD: Y1001D, A265Y, N266I, N266L, and W284H.

[0314] Results indicate that PTEs comprising the following amino acid substitutions relative to SEQ ID NO: 4 were found to be active against GB and/or GD: T148V, A265M, A265Y, N266T, C267W, and W284H.

[0315] Results indicate that PTEs comprising the following amino acid substitutions relative to SEQ ID NO: 6 were found to be active against GB and/or GD: Q75K, Y128H, G229N, M231C, and R303Q.

[0316] FIGS. 7A-7B depict strains expressing PTEs that are capable of hydrolyzing both V-agents and G-agents. Results indicate that PTEs comprising the following amino acid substitutions relative to SEQ ID NO: 1 were found to be active against VX, VR, GB, and GD: A265Y, N266M, and C267W. PTEs comprising the following amino acid substitutions relative to SEQ ID NO: 2 were found to be active against VX, VR, GB, and GD: T99C, V103H, P151W, L272C, and L272W. PTEs comprising the following amino acid substitutions relative to SEQ ID NO: 3 were found to be active against VX, VR, GB, and GD: A265Y, N266I, and N266L.

[0317] PTEs comprising the following amino acid substitutions relative to SEQ ID NO: 1 were found to be active against VX, VR, and GB: C267W and N266G. PTEs comprising the following amino acid substitutions relative to SEQ ID NO: 2 were found to be active against VX, VR, and GB: T99C, L272C, and L272W. PTEs comprising the following amino acid substitutions relative to SEQ ID NO: 3 were found to be active against VX, VR, and GB: N266I and N266L. PTEs comprising an A265Y substitution relative to SEQ ID NO: 1 were found to be active against VX, VR, and GD.

[0318] FIG. 8 depicts strains expressing PTEs that are capable of hydrolyzing VX and GD.

[0319] FIG. 9 depicts strains expressing PTEs that are capable of hydrolyzing VR and GD.

[0320] FIG. 10 depicts strains expressing PTEs that are capable of hydrolyzing VX and GB.

[0321] FIG. 11 depicts strains expressing PTEs that are capable of hydrolyzing VR and GB.

[0322] Several engineered PTEs identified in Example 2 showed both V-agent and G-agent hydrolysis activity (FIGS. 7A-7B). The ability of an engineered PTE to hydrolyze both V-agents and G-agents may be due to substitution mutations at important amino acid residue positions. For example, of five V-agent hydrolyzing PTEs identified in Example 2 that comprise an amino acid substitution at residue position N266, and that were tested for G-agent hydrolyzing activity, two of them were found to also exhibit G-agent hydrolyzing activity (the PTEs expressed by strain t810692 and strain t810152; FIGS. 7A-7B). Of two V-agent hydrolyzing PTEs identified in Example 2 that comprise an amino acid substitution at residue position L272, and that were tested for G-agent hydrolyzing activity, both of them also exhibited G-agent hydrolyzing activity (the PTEs expressed by strain t810666 and strain t809936; FIGS. 7A-7B). These results suggest that amino acid substitutions at residue positions N266 and L272 may be important for general OPNA hydrolyzing activity.

[0323] None of the PTERs identified in Example 2 that were tested for G-agent hydrolyzing activity were found to exhibit G-agent hydrolyzing activity.

### EQUIVALENTS

[0324] Those skilled in the art will recognize or be able to ascertain using no more than routine experimentation, many equivalents to the specific embodiments of the invention described in the present application. Such equivalents are intended to be encompassed by the following claims.

[0325] All references, including patent documents, are incorporated by reference in their entirety.

1. A host cell that comprises a heterologous polynucleotide encoding an OPNA hydrolyzing enzyme, wherein the OPNA hydrolyzing enzyme is a phosphotriesterase (PTE), and wherein the PTE comprises a sequence that is at least 90% identical to any one of SEQ ID NOs: 1-4.

2. The host cell of claim 1, wherein the PTE comprises the sequence of any one of SEQ ID NOs: 1-4.

3. The host cell of claim 1 or 2, wherein the OPNA is a V-agent (such as VX or VR), a G-agent, a VG-agent, an A-agent, an organophosphorus pesticide, or any combination thereof.

4. The host cell of any one of claims 1-3, wherein the host cell is a bacterial cell, an archaebacterial cell, a fungal cell, a yeast cell, an animal cell, a mammalian cell, or a human cell.

5. The host cell of claim 4, wherein the host cell is a bacterial cell.

6. The host cell of claim 5, wherein the bacterial cell is an Escherichia coli (E. coli) cell.

7. The host cell of claim 5, wherein the bacterial cell is a Bacillus cell.

8. The host cell of any one of claims 1-4, wherein the host cell is a filamentous fungi cell or a yeast cell.

9. The host cell of claim 6, wherein the E. coli cell is an E. coli BL21(DE3) cell.

10. The host cell of any one of claims 1-9, wherein the PTE comprises one or more amino acid substitutions relative to the sequence of any one of SEQ ID NOs: 1-4.

11. The host cell of claim 10, wherein one or more of the amino acid substitutions relative to the sequence of any one of SEQ ID NOs: 1-4 is within the active site of the PTE.

12. The host cell of claim 10 or 11, wherein the PTE comprises a sequence that is at least 90% identical to any one of SEQ ID NOs: 36-795.

13. The host cell of claim 12, wherein the PTE comprises the sequence of any one of SEQ ID NOs: 36-795.

14. The host cell of any one of claims 1-13, wherein the PTE has a K_{cat}/K_{M} value greater than 10⁷ M⁻¹ min⁻¹.

15. The host cell of any one of claims 1-14, wherein the PTE has activity against VX and VR and wherein the PTE comprises one or more of the following amino acid substitutions relative to SEQ ID NO: 1: V25M, I27F, I27M, I27T, V66I, L68N, L68M, L68C, T69S, V70P, V70C, V70T, L144I, A147G, A147F, T148V, T148C, T148M, V164I, S176T, S176M, S176V, S176C, S176Y, S176I, T177C, T179C, T179S, A181P, A181S, A181C, S208T, S208A, G228S, H263M, H263S, H263C, H263T, H263N, A265C, A265T, A265F, A265W, A265M, N266S, N266M, N266T, N266G, N266A, C267A, C267T, C267W, W284D, W284H, W284C, W284N, W284Y, Y286M, and Y286W.

16. The host cell of any one of claims 1-14 wherein the PTE has activity against VX and VR and wherein the PTE comprises one or more of the following amino acid substitutions relative to SEQ ID NO: 2: S2K, S2T, S2A, E3K, E3T, E3Q, L4I, L4V, N5R, N5Q, N5M, R8L, R8T, R8C, S10P, D12E, D12P, T13P, T13A, A14S, A14E, A14D, A15D, A15Q, A15E, L16M, V18M, V18I, M28D, T29S, T30S, T30W, T30P, E31G, I32V, I32M, I32W, 132F, A33W, E34Q, N35D, Y36F, Y36W, Y36H, E38D, A39P, W40F, D42N, E43D, D44E, D44N, V47I, V47M, A48E, A48W, D49H, D49W, D49C, D49M, V51I, V51L, K52R, R53Q, R53E, N55K, E56D, E56R, E56Q, L57F, A59E, A59Q, R60A, R60H, D63N, T64S, G72D, Y76N, Y76D, I77V, P78D, P78E, I80L, I80M, I80V, A81R, R82K, R82E, V83L, V83I, A84S, A85E, A85R, E86R, T87S, E88G, L89V, L89M, N90H, I91V, V92I, V93C, T99C, V103W, V103Y, V103H, M105W, Y106F, Y106H, Y106W, F107Y, F107W, F107M, Y109W, Y109F, L110M, L110W, E115D, G118T, G118S, E120D, I121Q, I121E, M122L, M122I, T123A, D124E, V127I, R128H, R128N, Q132D, Q132E, I134V, A135E, A135G, D136G, I139V, K140H, K140R, T150Y, T150S, T150H, P151W, P151H, P151N, P151D, V153I, P155E, P155D, G156W, E158H, A165C, Q166R, H168Q, G182D, L183T, L187H, L187M, L187F, E188W, Q190I, Q190L, K191R, F193L, E194D, E195D, L200P, S201N, R202H, R202K, V203C, V2031, 1214M, G215E, G215D, E219D, L220I, L220M, L220V, I221M, I221C, I221A, A222H, A223R, S225C, Y226W, L227V, L227I, D235C, A236H, A236W, A236K, L238M, L238H, P239S, F240W, F240D, F240Y, E241D, D242E, V244C, N245D, N245E, N245R, T246M, T246L, V247I, V247L, Q249E, Q249W, Q249R, Q249H, M250L, C251I, C251V, E252H, R253N, H255Y, H255W, K258H, K258R, M259I, A271G, L272H, L272W, L272M, D274G, D274W, E275K, V277W, S278R, Q279K, Q279R, Q279H, M281Y, M281F, P282G, N283D, N283G, H285G, L287T, H288F, H288Y, I289L, 1289V, H290F, H290L, N291R, N291D, N291T, N291E, D292N, D292R, V293I, I294L, I294V, A296M, K298M, K298R, E299Q, E299K, E299R, R300A, T303S, T303D, D304E, D304Q, E305D, E305A, Q306D, Q306E, L307I, L307V, H308R, H308E, H308N, T309Q, T309K, T309R, L311M, L311F, L311T, V312I, D313E, R316A, R316K, R316Q, R317K, R317N, I318M, I318F, I318L, E320S, E320Q, E320D, Q322R, Q322E, Q322K, A324P, A324S, Y325W, Y325F, Y325H, E326Q, E326R, and E326K.

17. The host cell of any one of claims 1-14, wherein the PTE has activity against VX and VR and wherein the PTE comprises one or more of the following amino acid substitutions relative to SEQ ID NO: 3: V25A, V25T, V25I, I27F, I27T, I27M, I27L, L68N, L68P, L68Q, L68M, T69S, V70P, V70C, Y100E, Y100H, Y100D, Y100Q, L144I, C146V, C146I, A147C, T148I, T148A, T148V, V164I, S176L, S176H, S176V, S176C, S176I, S176Y, S176F, T177C, H178D, T179C, A181S, Q189M, Q189V, Q189A, Q189I, Q189C, G206S, S208A, S208T, S208C, G209N, G228S, V260I, S262G, H263M, H263G, H263T, H263Q, A265T, A265S, A265M, A265W, N266L, N266I, N266G, N266T, N266A, N266C, N266Q, C267T, C267W, W284E, and W284T.

18. The host cell of any one of claims 1-14, wherein the PTE has activity against VX and VR and wherein the PTE comprises one or more of the following amino acid substitutions relative to SEQ ID NO: 4: L20M, V25L, V25M, F26W, F26H, I27M, I27F, I27V, I27T, V66I, L68N, L68M, L68C, Y98W, F126M, L144I, C146V, A147I, A147G, A147S, A147M, T148M, T148C, T148I, T148V, V164T, V164I, H168S, V173C, S176T, S176M, S176H, H178D, A181S, A181G, Q189M, Q189V, Q189C, I204V, G206S, S208C, S208T, G209N, V260I, S262G, H263S, H263C, H263T, H263N, A265L, A265Q, A265T, A265S, A265Y, A265W, N266C, N266G, N266S, N266T, N266A, C267W, C267A, C267T, C267G, W284H, W284Y, W284M, W284F, W284N, Y286F, Y286M, and Y286W.

19. The host cell of any one of claims 1-14 wherein the PTE has activity against VX and wherein the PTE comprises one or more of the following amino acid substitutions relative to SEQ ID NO: 1: 127C, I27Q, I27Y, L68A, S176F, T177L, T179E, G209N, and N266W.

20. The host cell of any one of claims 1-14, wherein the PTE has activity against VX and wherein the PTE comprises one or more of the following amino acid substitutions relative to SEQ ID NO: 2: E38H, I77P, V153W, E188C, L238Y, L276W, and A296R.

21. The host cell of any one of claims 1-14, wherein the PTE has activity against VX and wherein the PTE comprises one or more of the following amino acid substitutions relative to SEQ ID NO: 3: V25C, I27Y, I27C, I27W, I27V, L68A, L73V, N266W, and N266H.

22. The host cell of any one of claims 1-14, wherein the PTE has activity against VX and wherein the PTE comprises one or more of the following amino acid substitutions relative to SEQ ID NO: 4: 127C, T69S, F126C, S176Y, S176I, S176F, T177C, H178Y, Q189L, Q189I, Q189A, and S208A.

23. The host cell of any one of claims 1-14, wherein the PTE has activity against VR and wherein the PTE comprises one or more of the following amino acid substitutions relative to SEQ ID NO: 1: V25I, I27W, K145R, S176H, S208C, G228A, H263F, A265L, W284Q, W284K, W284I, and W284R.

24. The host cell of any one of claims 1-14, wherein the PTE has activity against VR and wherein the PTE comprises one or more of the following amino acid substitutions relative to SEQ ID NO: 3: Y98F, Q189L, G206N, H263F, W284K, and W284R.

25. The host cell of any one of claims 1-14, wherein the PTE has activity against VR and wherein the PTE comprises one or more of the following amino acid substitutions relative to SEQ ID NO: 4: E23D, F26M, H178V, D210C, G228S, A265M, A265C, A265I, A265V, W284C, W284Q, and W284R.

26. A method of treating or protecting against OPNA toxicity, comprising administering to a subject in need thereof a therapeutically effective amount of an OPNA hydrolyzing enzyme, or a polynucleotide encoding an OPNA hydrolyzing enzyme, wherein the OPNA hydrolyzing enzyme is a phosphotriesterase (PTE), and wherein the PTE comprises a sequence that is at least 90% identical to any one of SEQ ID NOs: 1-4.

27. A method of treating or protecting against OPNA toxicity, comprising administering to a subject in need thereof a cell comprising a heterologous polynucleotide encoding a therapeutically effective amount of an OPNA hydrolyzing enzyme, wherein the OPNA hydrolyzing enzyme is a phosphotriesterase (PTE), and wherein the PTE comprises a sequence that is at least 90% identical to any one of SEQ ID NOs: 1-4.

28. The method of claim 27, wherein the cell is a human cell, an animal cell, a yeast cell, or a bacterial cell.

29. A method of hydrolyzing or degrading an OPNA, comprising contacting an OPNA with an OPNA hydrolyzing enzyme, wherein the OPNA hydrolyzing enzyme is a phosphotriesterase (PTE), and wherein the PTE comprises a sequence that is at least 90% identical to any one of SEQ ID NOs: 1-4.

30. A method of hydrolyzing or degrading an OPNA, comprising contacting an OPNA with a cell comprising a heterologous polynucleotide encoding an OPNA hydrolyzing enzyme, wherein the OPNA hydrolyzing enzyme is a phosphotriesterase (PTE), wherein the PTE comprises a sequence that is at least 90% identical to any one of SEQ ID NOs: 1-4, and wherein the cell is in a solution, in a sprayable form, in dried form, or in immobilized form.

31. The method of claim 30, wherein the cell is an archaebacterium cell or a soil bacterium cell, such as a Bacillus cell.

32. The method of any one of claims 26-31, wherein the PTE comprises the sequence of any one of SEQ ID NOs: 1-4.

33. The method of any one of claims 26-32, wherein the OPNA is a V-agent (such as VX or VR), a G-agent, a VG-agent, an A-agent, an organophosphorus pesticide, or any combination thereof.

34. The method of any one of claims 26-33, wherein the PTE is recombinantly produced.

35. The method of claim 34, wherein the PTE is recombinantly produced in a bacterial cell or archaebacterial cell.

36. The method of claim 35, wherein the bacterial cell is an E. coli cell.

37. The method of claim 35, wherein the bacterial cell is a Bacillus cell.

38. The method of claim 34, wherein the PTE is recombinantly produced in a filamentous fungi cell or a yeast cell.

39. The method of claim 36, wherein the E. cell is an E. coli BL21(DE3) cell.

40. The method of any one of claims 26-39, wherein the PTE comprises one or more amino acid substitutions relative to the sequence of any one of SEQ ID NOs: 1-4.

41. The method of claim 40, wherein one or more of the amino acid substitutions relative to the sequence of any one of SEQ ID NOs: 1-4 is within the active site of the PTE.

42. The method of claim 40 or 41, wherein the PTE comprises a sequence that is at least 90% identical to any one of SEQ ID NOs: 36-795.

43. The method of claim 42, wherein the PTE comprises the sequence of any one of SEQ ID NOs: 36-795.

44. The method of any one of claims 26-43, wherein the PTE has a K_{cat}/K_{M} value greater than 10⁷ M⁻¹ min⁻¹.

45. The method of any one of claims 26-44, wherein the PTE is applied to an article of clothing.

46. The method of any one of claims 26-45, wherein the method is a method of protecting a subject against exposure to an OPNA.

47. The method of any one of claims 26-46, wherein the method is a method of treating a subject that has been exposed to an OPNA.

48. An OPNA hydrolyzing enzyme, wherein the OPNA hydrolyzing enzyme is a PTE, wherein the PTE comprises a sequence that is at least 90% identical to any one of SEQ ID NOs: 1-4, and wherein the sequence comprises one or more amino acid substitutions relative to the sequence of any one of SEQ ID NOs: 1-4.

49. The OPNA hydrolyzing enzyme of claim 48, wherein one or more of the amino acid substitutions relative to the sequence of any one of SEQ ID NOs: 1-4 is within the active site of the PTE.

50. The OPNA hydrolyzing enzyme of claim 48 or 49, wherein the OPNA is a V-agent (such as VX or VR), a G-agent, a VG-agent, an A-agent, an organophosphorus pesticide, or any combination thereof.

51. The OPNA hydrolyzing enzyme of any one of claims 48-50, wherein the PTE is recombinantly produced.

52. The OPNA hydrolyzing enzyme of any one of claims 48-51, wherein the PTE is recombinantly produced in a bacterial cell or an archaebacterial cell.

53. The OPNA hydrolyzing enzyme of claim 52, wherein the bacterial cell is an E. coli cell.

54. The OPNA hydrolyzing enzyme of claim 52, wherein the bacterial cell is a Bacillus cell.

55. The OPNA hydrolyzing enzyme of claim 51, wherein the PTE is recombinantly produced in a filamentous fungi cell or a yeast cell.

56. The OPNA hydrolyzing enzyme of claim 53, wherein the E. cell is an E. coli BL21(DE3) cell.

57. The OPNA hydrolyzing enzyme of any one of claims 48-56, wherein the PTE comprises a sequence that is at least 90% identical to any one of SEQ ID NOs: 36-795.

58. The OPNA hydrolyzing enzyme of claim 57, wherein the PTE comprises the sequence of any one of SEQ ID NOs: 36-795.

59. The OPNA hydrolyzing enzyme of any one of claims 48-58, wherein the PTE has a k_{cat}/K_{M} value greater than 10⁷ M⁻¹ min⁻¹.

60. The OPNA hydrolyzing enzyme of any one of claims 48-59, wherein the OPNA hydrolyzing enzyme has activity against VX and VR and wherein the OPNA hydrolyzing enzyme comprises one or more of the following amino acid substitutions relative to SEQ ID NO: 1: V25M, I27F, I27M, I27T, V66I, L68N, L68M, L68C, T69S, V70P, V70C, V70T, L144I, A147G, A147F, T148V, T148C, T148M, V164I, S176T, S176M, S176V, S176C, S176Y, S176I, T177C, T179C, T179S, A181P, A181S, A181C, S208T, S208A, G228S, H263M, H263S, H263C, H263T, H263N, A265C, A265T, A265F, A265W, A265M, N266S, N266M, N266T, N266G, N266A, C267A, C267T, C267W, W284D, W284H, W284C, W284N, W284Y, Y286M, and Y286W.

61. The OPNA hydrolyzing enzyme of any one of claims 48-59, wherein the OPNA hydrolyzing enzyme has activity against VX and VR and wherein the OPNA hydrolyzing enzyme comprises one or more of the following amino acid substitutions relative to SEQ ID NO: 2: S2K, S2T, S2A, E3K, E3T, E3Q, L4I, L4V, N5R, N5Q, N5M, R8L, R8T, R8C, S10P, D12E, D12P, T13P, T13A, A14S, A14E, A14D, A15D, A15Q, A15E, L16M, V18M, V18I, M28D, T29S, T30S, T30W, T30P, E31G, I32V, I32M, I32W, I32F, A33W, E34Q, N35D, Y36F, Y36W, Y36H, E38D, A39P, W40F, D42N, E43D, D44E, D44N, V47I, V47M, A48E, A48W, D49H, D49W, D49C, D49M, V51I, V51L, K52R, R53Q, R53E, N55K, E56D, E56R, E56Q, L57F, A59E, A59Q, R60A, R60H, D63N, T64S, G72D, Y76N, Y76D, I77V, P78D, P78E, I80L, I80M, I80V, A81R, R82K, R82E, V83L, V83I, A84S, A85E, A85R, E86R, T87S, E88G, L89V, L89M, N90H, I91V, V92I, V93C, T99C, V103W, V103Y, V103H, M105W, Y106F, Y106H, Y106W, F107Y, F107W, F107M, Y109W, Y109F, L110M, L110W, E115D, G118T, G118S, E120D, I121Q, I121E, M122L, M122I, T123A, D124E, V127I, R128H, R128N, Q132D, Q132E, I134V, A135E, A135G, D136G, I139V, K140H, K140R, T150Y, T150S, T150H, P151W, P151H, P151N, P151D, V153I, P155E, P155D, G156W, E158H, A165C, Q166R, H168Q, G182D, L183T, L187H, L187M, L187F, E188W, Q190I, Q190L, K191R, F193L, E194D, E195D, L200P, S201N, R202H, R202K, V203C, V2031, 1214M, G215E, G215D, E219D, L220I, L220M, L220V, I221M, I221C, I221A, A222H, A223R, S225C, Y226W, L227V, L227I, D235C, A236H, A236W, A236K, L238M, L238H, P239S, F240W, F240D, F240Y, E241D, D242E, V244C, N245D, N245E, N245R, T246M, T246L, V247I, V247L, Q249E, Q249W, Q249R, Q249H, M250L, C251I, C251V, E252H, R253N, H255Y, H255W, K258H, K258R, M259I, A271G, L272H, L272W, L272M, D274G, D274W, E275K, V277W, S278R, Q279K, Q279R, Q279H, M281Y, M281F, P282G, N283D, N283G, H285G, L287T, H288F, H288Y, I289L, I289V, H290F, H290L, N291R, N291D, N291T, N291E, D292N, D292R, V293I, I294L, I294V, A296M, K298M, K298R, E299Q, E299K, E299R, R300A, T303S, T303D, D304E, D304Q, E305D, E305A, Q306D, Q306E, L307I, L307V, H308R, H308E, H308N, T309Q, T309K, T309R, L311M, L311F, L311T, V312I, D313E, R316A, R316K, R316Q, R317K, R317N, I318M, I318F, I318L, E320S, E320Q, E320D, Q322R, Q322E, Q322K, A324P, A324S, Y325W, Y325F, Y325H, E326Q, E326R, and E326K.

62. The OPNA hydrolyzing enzyme of any one of claims 48-59, wherein the OPNA hydrolyzing enzyme has activity against VX and VR and wherein the OPNA hydrolyzing enzyme comprises one or more of the following amino acid substitutions relative to SEQ ID NO: 3: V25A, V25T, V25I, I27F, I27T, I27M, I27L, L68N, L68P, L68Q, L68M, T69S, V70P, V70C, Y100E, Y100H, Y100D, Y100Q, L144I, C146V, C146I, A147C, T148I, T148A, T148V, V164I, S176L, S176H, S176V, S176C, S176I, S176Y, S176F, T177C, H178D, T179C, A181S, Q189M, Q189V, Q189A, Q189I, Q189C, G206S, S208A, S208T, S208C, G209N, G228S, V260I, S262G, H263M, H263G, H263T, H263Q, A265T, A265S, A265M, A265W, N266L, N266I, N266G, N266T, N266A, N266C, N266Q, C267T, C267W, W284E, and W284T.

63. The OPNA hydrolyzing enzyme of any one of claims 48-59, wherein the OPNA hydrolyzing enzyme has activity against VX and VR and wherein the OPNA hydrolyzing enzyme comprises one or more of the following amino acid substitutions relative to SEQ ID NO: 4: L20M, V25L, V25M, F26W, F26H, I27M, I27F, I27V, I27T, V66I, L68N, L68M, L68C, Y98W, F126M, L144I, C146V, A147I, A147G, A147S, A147M, T148M, T148C, T148I, T148V, V164T, V164I, H168S, V173C, S176T, S176M, S176H, H178D, A181S, A181G, Q189M, Q189V, Q189C, I204V, G206S, S208C, S208T, G209N, V260I, S262G, H263S, H263C, H263T, H263N, A265L, A265Q, A265T, A265S, A265Y, A265W, N266C, N266G, N266S, N266T, N266A, C267W, C267A, C267T, C267G, W284H, W284Y, W284M, W284F, W284N, Y286F, Y286M, and Y286W.

64. The OPNA hydrolyzing enzyme of any one of claims 48-59, wherein the OPNA hydrolyzing enzyme has activity against VX and wherein the OPNA hydrolyzing enzyme comprises one or more of the following amino acid substitutions relative to SEQ ID NO: 1: I27C, I27Q, I27Y, L68A, S176F, T177L, T179E, G209N, and N266W.

65. The OPNA hydrolyzing enzyme of any one of claims 48-59, wherein the OPNA hydrolyzing enzyme has activity against VX and wherein the OPNA hydrolyzing enzyme comprises one or more of the following amino acid substitutions relative to SEQ ID NO: 2: E38H, I77P, V153W, E188C, L238Y, L276W, and A296R.

66. The OPNA hydrolyzing enzyme of any one of claims 48-59, wherein the OPNA hydrolyzing enzyme has activity against VX and wherein the OPNA hydrolyzing enzyme comprises one or more of the following amino acid substitutions relative to SEQ ID NO: 3: V25C, I27Y, I27C, I27W, I27V, L68A, L73V, N266W, and N266H.

67. The OPNA hydrolyzing enzyme of any one of claims 48-59, wherein the OPNA hydrolyzing enzyme has activity against VX and wherein the OPNA hydrolyzing enzyme comprises one or more of the following amino acid substitutions relative to SEQ ID NO: 4: I27C, T69S, F126C, S176Y, S176I, S176F, T177C, H178Y, Q189L, Q189I, Q189A, and S208A.

68. The OPNA hydrolyzing enzyme of any one of claims 48-59, wherein the OPNA hydrolyzing enzyme has activity against VR and wherein the OPNA hydrolyzing enzyme comprises one or more of the following amino acid substitutions relative to SEQ ID NO: 1: V25I, I27W, K145R, S176H, S208C, G228A, H263F, A265L, W284Q, W284K, W284I, and W284R.

69. The OPNA hydrolyzing enzyme of any one of claims 48-59, wherein the OPNA hydrolyzing enzyme has activity against VR and wherein the OPNA hydrolyzing enzyme comprises one or more of the following amino acid substitutions relative to SEQ ID NO: 3: Y98F, Q189L, G206N, H263F, W284K, and W284R.

70. The OPNA hydrolyzing enzyme of any one of claims 48-59, wherein the OPNA hydrolyzing enzyme has activity against VR and wherein the OPNA hydrolyzing enzyme comprises one or more of the following amino acid substitutions relative to SEQ ID NO: 4: E23D, F26M, H178V, D210C, G228S, A265M, A265C, A265I, A265V, W284C, W284Q, and W284R.

71. A host cell that comprises a heterologous polynucleotide encoding an OPNA hydrolyzing enzyme, wherein the OPNA hydrolyzing enzyme comprises a sequence that is at least 90% identical to any one of SEQ ID NOs: 6 and 796-956.

72. The host cell of claim 71, wherein the OPNA hydrolyzing enzyme comprises the sequence of any one of SEQ ID NOs: 6 and 796-956.

73. The host cell of claim 71 or 72, wherein the OPNA is a V-agent (such as VX or VR), a G-agent, a VG-agent, an A-agent, an organophosphorus pesticide, or any combination thereof.

74. The host cell of any one of claims 71-73, wherein the host cell is a bacterial cell, an archaebacterial cell, a fungal cell, a yeast cell, an animal cell, a mammalian cell, or a human cell.

75. The host cell of claim 74, wherein the host cell is a bacterial cell.

76. The host cell of claim 75, wherein the bacterial cell is an Escherichia coli (E. coli) cell.

77. The host cell of claim 75, wherein the bacterial cell is a Bacillus cell.

78. The host cell of any one of claims 71-74, wherein the host cell is a filamentous fungi cell or a yeast cell.

79. The host cell of claim 76, wherein the E. coli cell is an E. coli BL21(DE3) cell.

80. The host cell of any one of claims 71-79, wherein the PTE has a K_{cat}/K_{M} value greater than 10⁷ M⁻¹ min⁻¹.

81. A method of treating or protecting against OPNA toxicity, comprising administering to a subject in need thereof a therapeutically effective amount of an OPNA hydrolyzing enzyme, or a polynucleotide encoding an OPNA hydrolyzing enzyme, wherein the OPNA hydrolyzing enzyme comprises a sequence that is at least 90% identical to any one of SEQ ID NOs: 6 and 796-956.

82. A method of hydrolyzing or degrading an OPNA, comprising administering to a subject in need thereof a cell comprising a heterologous polynucleotide encoding a therapeutically effective amount of an OPNA hydrolyzing enzyme, wherein the OPNA hydrolyzing enzyme comprises a sequence that is at least 90% identical to any one of SEQ ID NOs: 6 and 796-956.

83. The method of claim 82, wherein the cell is a human cell, an animal cell, a yeast cell, or a bacterial cell.

84. A method of hydrolyzing or degrading an OPNA, comprising contacting an OPNA with an OPNA hydrolyzing enzyme, wherein the OPNA hydrolyzing enzyme comprises a sequence that is at least 90% identical to any one of SEQ ID NOs: 6 and 796-956.

85. A method of hydrolyzing or degrading an OPNA, comprising contacting an OPNA with a cell comprising a heterologous polynucleotide encoding an OPNA hydrolyzing enzyme, wherein the OPNA hydrolyzing enzyme comprises a sequence that is at least 90% identical to any one of SEQ ID NOs: 6 and 796-956 and wherein the cell is in a solution, in a sprayable form, in dried form, or in immobilized form.

86. The method of claim 85, wherein the cell is an archaebacterium cell or a soil bacterium cell, such as a Bacillus cell.

87. An OPNA hydrolyzing enzyme, wherein the OPNA hydrolyzing enzyme comprises a sequence that is at least 90% identical to any one of SEQ ID NOs: 6 and 796-956.

88. The OPNA hydrolyzing enzyme of claim 87, wherein the OPNA hydrolyzing enzyme comprises one or more amino acid substitutions relative to the sequence of SEQ ID NO: 6.

89. The OPNA hydrolyzing enzyme of claim 87 or 88, wherein the OPNA hydrolyzing enzyme has activity against VX and VR and wherein the OPNA hydrolyzing enzyme comprises the following amino acid substitution relative to SEQ ID NO: 6:1258V.

90. The OPNA hydrolyzing enzyme of claim 87 or 88, wherein the OPNA hydrolyzing enzyme has activity against VR and wherein the OPNA hydrolyzing enzyme comprises one or more of the following amino acid substitutions relative to SEQ ID NO: 6: R204M or G229N.

91. The host cell of any one of claims 1-14, wherein the PTE has activity against GB and GD and wherein the PTE comprises one or more of the following amino acid substitutions relative to SEQ ID NO: 1: A265Y, N266G, N266M, C267W, and W284H.

92. The host cell of any one of claims 1-14, wherein the PTE has activity against GB and GD and wherein the PTE comprises one or more of the following amino acid substitutions relative to SEQ ID NO: 2: T29S, T99C, V103H, P151W, A236K, L272C, L272W, M281Y, and H285G.

93. The host cell of any one of claims 1-14, wherein the PTE has activity against GB and GD and wherein the PTE comprises one or more of the following amino acid substitutions relative to SEQ ID NO: 3: Y100D, A265Y, N266I, N266L, and W284H.

94. The host cell of any one of claims 1-14, wherein the PTE has activity against GB and GD and wherein the PTE comprises one or more of the following amino acid substitutions relative to SEQ ID NO: 4: T148V, A265M, A265Y, N266T, C267W, and W284H.

95. The host cell of any one of claims 1-14, wherein the PTE has activity against VX, VR, GB, and GD and wherein the PTE comprises one or more of the following amino acid substitutions relative to SEQ ID NO: 1: A265Y, N266M, and C267W.

96. The host cell of any one of claims 1-14, wherein the PTE has activity against VX, VR, GB, and GD and wherein the PTE comprises one or more of the following amino acid substitutions relative to SEQ ID NO: 2: T99C, V103H, P151W, L272C, and L272W.

97. The host cell of any one of claims 1-14, wherein the PTE has activity against VX, VR, GB, and GD and wherein the PTE comprises one or more of the following amino acid substitutions relative to SEQ ID NO: 3: A265Y, N266I, and N266L.

98. The host cell of any one of claims 1-14, wherein the PTE has activity against VR, GB, and GD and wherein the PTE comprises one or more of the following amino acid substitutions relative to SEQ ID NO: 1: W284H.

99. The host cell of any one of claims 1-14, wherein the PTE has activity against VR and GD and wherein the PTE comprises one or more of the following amino acid substitutions relative to SEQ ID NO: 1: A265Y.

100. The host cell of any one of claims 1-14, wherein the PTE has activity against VX, VR and GD and wherein the PTE comprises the following amino acid substitution relative to SEQ ID NO: 1: A265Y.

101. The host cell of any one of claims 1-14, wherein the PTE has activity against VX, VR and GB and wherein the PTE comprises one or more of the following amino acid substitutions relative to SEQ ID NO: 1: C267W and N266G.

102. The host cell of any one of claims 1-14, wherein the PTE has activity against VX, VR and GB and wherein the PTE comprises one or more of the following amino acid substitutions relative to SEQ ID NO: 2: T99C, L272C, and L272W.

103. The host cell of any one of claims 1-14, wherein the PTE has activity against VX, VR and GB and wherein the PTE comprises one of the following amino acid substitutions relative to SEQ ID NO: 3: N266I or N266L.

104. The method of any one of claims 26-32, wherein the PTE has activity against VX and/or VR.

105. The method of any one of claims 26-32, wherein the PTE has activity against GB and/or GD.

106. The method of any one of claims 26-32, wherein the PTE has activity against VX, VR, GB, and GD.

107. The OPNA hydrolyzing enzyme of any one of claims 48-59, wherein the OPNA hydrolyzing enzyme has activity against GB and GD and wherein the OPNA hydrolyzing enzyme comprises one or more of the following amino acid substitutions relative to SEQ ID NO: 1: A265Y, N266G, N266M, C267W, and W284H.

108. The OPNA hydrolyzing enzyme of any one of claims 48-59, wherein the OPNA hydrolyzing enzyme has activity against GB and GD and wherein the OPNA hydrolyzing enzyme comprises one or more of the following amino acid substitutions relative to SEQ ID NO: 2: T29S, T99C, V103H, P151W, A236K, L272C, L272W, M281Y, and H285G.

109. The OPNA hydrolyzing enzyme of any one of claims 48-59, wherein the OPNA hydrolyzing enzyme has activity against GB and GD and wherein the OPNA hydrolyzing enzyme comprises one or more of the following amino acid substitutions relative to SEQ ID NO: 3: Y100D, A265Y, N266I, N266L, and W284H.

110. The OPNA hydrolyzing enzyme of any one of claims 48-59, wherein the OPNA hydrolyzing enzyme has activity against GB and GD and wherein the OPNA hydrolyzing enzyme comprises one or more of the following amino acid substitutions relative to SEQ ID NO: 4: T148V, A265M, A265Y, N266T, C267W, and W284H.

111. The OPNA hydrolyzing enzyme of any one of claims 48-59, wherein the OPNA hydrolyzing enzyme has activity against VX, VR, GB, and GD and wherein the OPNA hydrolyzing enzyme comprises one or more of the following amino acid substitutions relative to SEQ ID NO: 1: A265Y, N266M, and C267W.

112. The OPNA hydrolyzing enzyme of any one of claims 48-59, wherein the OPNA hydrolyzing enzyme has activity against VX, VR, GB, and GD and wherein the OPNA hydrolyzing enzyme comprises one or more of the following amino acid substitutions relative to SEQ ID NO: 2: T99C, V103H, P151W, L272C, and L272W.

113. The OPNA hydrolyzing enzyme of any one of claims 48-59, wherein the OPNA hydrolyzing enzyme has activity against VX, VR, GB, and GD and wherein the OPNA hydrolyzing enzyme comprises one or more of the following amino acid substitutions relative to SEQ ID NO: 3: A265Y, N266I, and N266L.

114. The OPNA hydrolyzing enzyme of any one of claims 48-59, wherein the OPNA hydrolyzing enzyme has activity against VR, GB, and GD and wherein the OPNA hydrolyzing enzyme comprises the following amino acid substitutions relative to SEQ ID NO: 1: W284H.

115. The OPNA hydrolyzing enzyme of any one of claims 48-59, wherein the OPNA hydrolyzing enzyme has activity against VR and GD and wherein the OPNA hydrolyzing enzyme comprises the following amino acid substitution relative to SEQ ID NO: 1: A265Y.

116. The OPNA hydrolyzing enzyme of any one of claims 48-59, wherein the OPNA hydrolyzing enzyme has activity against VX, VR and GD and wherein the OPNA hydrolyzing enzyme comprises the following amino acid substitution relative to SEQ ID NO: 1: A265Y.

117. The OPNA hydrolyzing enzyme of any one of claims 48-59, wherein the OPNA hydrolyzing enzyme has activity against VX, VR and GB and wherein the OPNA hydrolyzing enzyme comprises one or more of the following amino acid substitutions relative to SEQ ID NO: 1: C267W and N266G.

118. The OPNA hydrolyzing enzyme of any one of claims 48-59, wherein the OPNA hydrolyzing enzyme has activity against VX, VR and GB and wherein the OPNA hydrolyzing enzyme comprises one or more of the following amino acid substitutions relative to SEQ ID NO: 2: T99C, L272C, and L272W.

119. The OPNA hydrolyzing enzyme of any one of claims 48-59, wherein the OPNA hydrolyzing enzyme has activity against VX, VR and GB and wherein the OPNA hydrolyzing enzyme comprises one of the following amino acid substitutions relative to SEQ ID NO: 3: N266I or N266L.

The application's sequence listing, which the Patent Office published only in electronic form, follows.

SEQUENCE LISTING (956 sequences)

SEQ ID NO: 1 - protein, 326 aa, Mycobacterium sp.
MSELNTARGAIDTTDLGVTLMHEHVFIMTTEIALNYPEAWGDEDKRVADAVSRLNELKARGVDTIVDLTVIGLGRYIPRIARVAAATELNIVVATGLYTYNDVPFRFHYEGPGGMLDGPEIMTEMFVRDIEQGIADTGVKAGILKCATDEPGITPGVERVLRAVAQAHKRTGVPISTHTHAGLRRGLEQQRIFEEEGVDLTRVVIGHSGDSTDIGYLEELIAAGSYLGMDRFGLDVISPFEERVKIVAQMCERGHADKMVLSHDANCYFDALPEELVPQMAPNWHYLHIHNDVIPALKERGVTDEQLKTMLVDNPRRIFERQGAYE

SEQ ID NO: 2 - protein, 326 aa, Mycobacterium colombiense
MSELNTARGSIDTAALGVTLMHEHVFIMTTEIAENYPEAWGDEDRRVADAVKRLNELKARGVDTIVDLTVIGLGRYIPRIARVAAETELNIVVATGLYTYNDVPMYFHYLGPGGELGGPEIMTDMFVRDIEQGIADTGIKAGILKCATDTPGVTPGVERVLRAVAQAHKRTGVPISTHTHAGLRRGLEQQKIFEEEGVDLSRVIIGHSGDSTDIGYLEELIAAGSYLGMDRFGIDAFLPFEDRVNTVAQMCERGHADKMVLSHDANCYFDALPDELVSQVMPNWHYLHIHNDVIPALKERGVTDEQLHTMLVDNPRRIFERQGAYE

SEQ ID NO: 3 - protein, 326 aa, Mycobacterium asiaticum
MSELNTARGPIDTADLGVTLMHEHVFIMTTEIALNYPDAWGDEEQRVADAITRLNELKSRGVDTIIDLTVIGLGRYIPRIARVAAETELNIVVATGLYTYNDIPFRFHYEGPGGLLGGPEIMTDMFVRDIEEGIADTGIKAGILKCATDEPGITPGVERVLRAVAQAHKRTGVPISTHTHAGLRRGLEQQRIFEEEGVDLTRVIIGHSGDSTDVGYLEELIAAGSYLGMDRFGLDVISPFEQRVDIVAQMCERGHADKMVLSHDANCYFDALPEELVPQMAPNWHYLHIHNDVLPALKERGVTDEQIHTMLVENPRKIFDRQGAYQ

SEQ ID NO: 4 - protein, 326 aa, Mycobacterium gordonae
MSELNTARGTIDTADLGVTLMHEHVFIMTTEIALNYPEAWGDEEKRVADAVARLNELKSRGVDTIVDLTVIGLGRYIPRIARVAAQTELNIVVATGLYTYNDIPFRFHYEGPGGMLDGPEIMTDMFVRDIEQGIADTGIKAGILKCATDEPGITPGVERVLRAVAQAHKRTGVPISTHTHAGLRRGLEQQRIFEEEGVDLTRVIIGHSGDSTDVGYLEELISAGSYLGMDRFGLDVLLPFEERVQIVATMCERGHADKMVLSHDANCYFDALPEQLVPQMAPNWHYLHIHNDVIPALKHRGVTDEQIHTMLVENPRKIFDRQGAYQ

SEQ ID NO: 5 - protein, 336 aa, Artificial Sequence
  Synthetic
MIGTGDRINTVRGPITISEAGFTLTHEHICGSSAGFLRAWPEFFGSRAALVEKAVRGLRRARAAGVRTIVDVSTFDAGRDVSLLAEVSRAADVHIVAATGLWFDPPLSMRLRSVEELTQFFLREIQYGIEDTGIRAGIIKVATTGKATPFQELVLKAAARASLATGVPVTTHTAASQRDGEQQAAIFESEGLSPSRVCIGHSDDTDDLSYLTALAARGYLIGLDNIPHSAIGLEDNASASALLGSRSWQTRALLIKALIDQGYMKQILVSNDWLFGFSSYVTNIMDVMDRVNPDGMAFIPLRVIPFLREKGVPQETLAGITVTNPARFLSPTLRAS

SEQ ID NO: 6 - protein, 349 aa, Prosthecomicrobium hirschii
MAAAETGTGHARIETVLGPIAPAALGATLMHEHLLCDLTPPARRGQGLPEPEITLETIFDMGYRPGRYHGNHRLQDVALATREAAAFKADGGGAIVELTTGGIVPDPEGLAAIARGAGIHVVLGAGFYTENFLDAETLALSTEALTEITLGQLTEGAWGTKVRCGLIGEIGCSWPLTPFERRSLKSGARAQIATGAAITIHPGRDRAAPDEILDVLEAEGADLSRVVIGHMDRTLLDDADVVALARRGSIVEYDFFGIEHSNYWLGVVDIPNDWMRIRALRKLFDAGLGDRVVISHDICTRTRLQSLGGHGYGHILRNVVPLMRDRGFSQSEIDLLLLETPRRILTIGG

SEQ ID NO: 7 - protein, 336 aa, Artificial Sequence
  Synthetic
MIGTGDRINTVRGPITISEAGFTLTHEHICGSSAGFLRAWPEFFGSRKALAEKAVRGLRRARAAGVRTIVDVSTFDIGRDVSLLAEVSRAADVHIVAATGLWFDPPLSMRLRSVEELTQFFLREIQYGIEDTGIRAGIIKVATTGKATPFQELVLKAAARASLATGVPVTTHTAASQRDGEQQAAIFESEGLSPSRVCIGHSDDTDDLSYLTALAARGYLIGLDHIPHSAIGLEDNASASALLGIRSWQTRALLIKALIDQGYMKQILVSNDWLFGFSSYVTNIMDVMDRVNPDGMAFIPLRVIPFLREKGVPQETLAGITVTNPARFLSPTLRAS

SEQ ID NO: 8 - protein, 332 aa, Artificial Sequence
  Synthetic
GDRINTVRGPITISEAGFTLTHEHICGSSAGFLRAWPEFFGSRAALVEKAVRGLRRARAAGVRTIVDVSTFDAGRDVSLLAEVSRAADVHIVAATGLWEDPPLSMRLRSVEELTQFFLREIQYGIEDTGIRAGIIKVATNGKATPFQELVLRAAARASLATGVPVTTHTAASQRDGEQQAAIFESEGLSPSRVCIGHSDDTDDLSYLTALAARGYLIGLDGIPHSAIGLEDNASASELLGIRSWQTRALLIKALIDQGYMKQILVSNDWLFGFSSYVTNIMDVMDSVNPDGMAFIPLRVIPFLREKGVPQETLAGITVTNPARFLSPTLRAS

SEQ ID NO: 9 - protein, 349 aa, Homo sapiens
MSSLSGKVQTVLGLVEPSKLGRTLTHEHLAMTFDCCYCPPPPCQEAISKEPIVMKNLYWIQKNAYSHKENLQLNQETEAIKEELLYFKANGGGALVENTTTGISRDTQTLKRLAEETGVHIISGAGFYVDATHSSETRAMSVEQLTDVLMNEILHGADGTSIKCGIIGEIGCSWPLTESERKVLQATAHAQAQLGCPVIIHPGRSSRAPFQIIRILQEAGADISKTVMSHLDRTILDKKELLEFAQLGCYLEYDLFGTELLHYQLGPDIDMPDDNKRIRRVRLLVEEGCEDRILVAHDIHTKTRLMKYGGHGYSHILTNVVPKMLLRGITENVLDKILIENPKQWLTFK

SEQ ID NO: 10 - DNA, 978 bp, Artificial Sequence
  Synthetic
atgtccgagctgaataccgcccgtggggctattgatacaacggacctaggcgtgactcttatgcacgaacatgtattcatcatgaccactgaaatcgcactgaactatccggaagcttggggtgacgaagataaacgcgtcgcggacgcagtttctcggctcaacgagctgaaggctaggggcgttgatactatagttgatctgaccgtaatcggtctgggtcgttacattccacgtatcgcgcgagtggccgctgctaccgaattaaacatcgtcgtggcgaccggcctgtacacttataacgacgttccttttcgtttccactacgaaggccccgggggtatgttggacggtccggagattatgacggaaatgttcgttcgcgatatcgagcagggaatcgcagacactggcgtaaaagcaggcattctgaaatgtgccacagatgaaccaggtatcaccccgggtgttgaacgtgtactgcgcgctgtagcgcaagcgcataagagaacgggtgttccgatctcaacccacacccacgctggcctgcgtcgtggcctggagcagcagcgtatttttgaagaagaaggcgtggacctgactcgcgtcgtgattggtcattcgggtgacagcactgatatcggctacttggaggaattgatcgctgcgggttcttatctgggcatggatcgcttcggactcgacgttatcagcccgtttgaagaacgtgtgaaaattgttgcccagatgtgcgagcgcggtcacgcagataaaatggttctgtctcacgacgccaattgctacttcgacgcactcccggaagaactggtcccgcaaatggctcctaactggcactacctgcatatacataatgatgtgatcccagcactgaaagagcgaggtgtgaccgatgaacagctgaagactatgctggtagacaacccgcgtaggatcttcgagcgccagggcgcttacgaa

SEQ ID NO: 11 - DNA, 978 bp, Artificial Sequence
  Synthetic
atgagtgagcttaacacggcaaggggttcgatcgacactgccgcgctcggcgtaaccctgatgcatgaacacgtgtttattatgactaccgaaatcgctgaaaattatcccgaggcttggggagatgaagaccgtagagttgctgatgcagtcaagcgtttaaacgaactgaaagcgcggggcgttgacacaatagttgatttgactgtaattggtctggggcgttacatcccgcgcatcgcccgagtggctgcggaaaccgagctgaacattgtagttgctactggtctgtacacttacaacgacgttccgatgtatttccactacctgggcccaggcggtgaactgggtggcccggaaatcatgaccgatatgttcgtgcgtgacatcgagcaaggtatcgctgataccggaattaaagcaggtatcctcaaatgcgcaactgacacacctggcgtcaccccgggcgtggaacgtgttctgcgtgctgtagcccaggcacataaacgcaccggtgtcccgatctccacgcacacccatgcaggcctgcgccgtggcctggaacagcagaagatttttgaagaagagggggttgatctgagccgcgtgattatcggtcactctggcgactctactgacatcggttatctggaggaattgattgcggcgggtagctacctaggcatggatcgtttcggtatcgacgctttcctgccgttcgaggaccgagtaaacacggttgcccagatgtgtgaacgcggccacgccgataaaatggttctgtcccacgatgctaattgctactttgacgcgctgcctgatgaactggtatctcaagtgatgccaaactggcattatttacacatccataacgacgtaatcccggctttaaaagaacgcggcgttaccgatgagcagctgcacactatgctggttgacaacccgagaagaatcttcgaacgtcagggtgcttacgaa

SEQ ID NO: 12 - DNA, 978 bp, Artificial Sequence
  Synthetic
atgagcgaactgaatacggcccgcggtcccattgatactgctgacttaggagtaaccctgatgcacgagcatgtgtttatcatgacaactgaaatcgcacttaactatcctgacgcgtggggcgatgaagagcaacgtgtcgctgacgcaataacccgtttgaacgaactgaaatcgagaggggttgataccattatcgacctgactgttatcggtctgggtcgctacattccacgtatcgctcgtgtggcggccgaaaccgagctgaacatcgttgtagctactggcctctacacttataacgatatcccgttccgattccactacgaaggcccgggcggtctgcttggtggcccggaaataatgaccgacatgtttgttcgggatatcgaagaaggcatcgcggatacgggtattaaggcaggtattttaaaatgtgctacggacgaaccgggtatcaccccgggcgtcgagcgcgttctgcgtgctgtggcgcaggctcataaacgcactggcgtacctatctctacccacactcacgccggtctgcgtcgcgggctggaacagcagcgtattttcgaggaagagggcgtggacctgacacgtgttatcatcgggcattccggtgactcaaccgatgtaggctacctggaagaactgattgcggcaggtagttatctgggtatggatcgcttcggcttggacgtgatcagcccgtttgagcaacgtgttgatattgtagcgcagatgtgcgaacgcggtcacgctgataagatggtcctgtctcacgacgcgaactgctacttcgacgctctaccagaagaactggttccccagatggcaccgaattggcattatttgcacatccacaacgacgttctgccagcactgaaagagcgtggagtcaccgacgaacagattcatacgatgttagttgaaaacccgcgtaaaatttttgatcgtcagggtgcttaccag

SEQ ID NO: 13 - DNA, 978 bp, Artificial Sequence
  Synthetic
atgtctgaactgaatacagctcgcggcacgatagacactgccgatcttggtgtcaccctcatgcatgagcacgtttttatcatgaccactgaaatcgcgctaaactatccagaagcatggggtgatgaagagaaacgtgtagctgacgctgttgcccgtctgaacgaactgaagtcacgaggggtggataccattgttgacctgaccgtgattggcctgggtcgctacatccctcgtatcgcacgtgtggcggctcagacggaattaaacattgtcgttgcaactggcctgtacacatacaatgatattccgttccgcttccactatgagggcccgggaggtatgctggacggtccggaaatcatgactgatatgtttgtgcgtgacatcgaacaaggcatcgcggacaccgggatcaaagctggtatccttaaatgcgccaccgatgaaccgggcattactccaggtgtagaaagggttttgcgtgctgtagcgcaggctcacaaacgtacgggcgtcccgatttccactcatacccacgcaggtctgcgccgcggcctggagcagcagcgcatcttcgaagaggaaggtgttgacctcactcgtgttatcataggtcacagcggcgattcgaccgatgtcgggtacctggaagaactgattagcgcaggttcttatttaggcatggaccgtttcggcctcgatgtgctgctgccctttgaggagcgggtacaaatcgttgcaacaatgtgtgaaagaggccatgccgacaagatggtactgtcccacgatgcgaactgctacttcgacgctctgccggaacagctggtaccgcagatggctccaaactggcattacctgcacatccataacgacgtgatccctgcgctgaaacaccgcggtgttactgacgaacaaatccacacgatgctggttgaaaacccgcgtaaaatcttcgaccgtcagggtgcctatcag

SEQ ID NO: 14 - DNA, 1008 bp, Artificial Sequence
  Synthetic
atgattggcacgggtgatcgaatcaatactgtacgtggccctatcaccataagcgaggcgggtttcacactgactcatgaacacatctgtggatcctctgctggttttttacgcgcgtggccggaatttttcggctcgagggcagctctggtggaaaaagcagttcggggtctgcgtcgcgctcgtgccgcaggcgttagaaccattgtggacgtatcaaccttcgatgctggtcgtgacgtcagccttctggcagaggtttctcgtgctgccgacgtacacattgtggctgcaactggtctgtggttcgatccacccctgtccatgcgtctgcgctcagttgaagagctgactcagtttttcctccgtgaaatccagtatggtatcgaagataccggcatccgcgctggaatcattaaagttgcgaccacggggaaagccaccccgttccaggaattggtactgaaagctgcggcacgtgcgtccctcgcaactggcgtcccggttactacgcacacggctgcttctcagcgcgacggcgaacagcaggcagccatttttgaaagcgagggtctgtccccgtctagggtctgcatcggccatagcgacgacaccgatgatttaagctacttaacagcactggccgcccgtgggtacctgataggcctggataacatcccgcacagcgctatcggactggaagacaacgcgagtgcttctgctctgctgggttcccgttcctggcaaactagagcactgctgatcaaggctctgattgatcaggggtacatgaaacaaatccttgtgagcaacgactggctgttcggtttcagttcgtatgttaccaacatcatggacgttatggatcgcgtgaaccctgacggtatggcgttcattccgttgagagtgatcccattcctgcgtgagaaaggcgtaccccaggaaaccctggccggtatcactgtaacaaatccggctcgctttctgtctccgactctgcgcgcatct

SEQ ID NO: 15 - DNA, 1047 bp, Artificial Sequence
  Synthetic
atggcagctgccgagacagggacgggccacgcgcgtatcgaaactgtattaggtcccattgctccagcagccctgggtgctaccctgatgcatgaacaccttctgtgcgacctcactccgcctgcgcggcgcggccaaggtctgccggaaccggagatcaccctggaaactatatttgatatgggctataggccgggccgttaccatggtaatcaccgactgcaagacgtcgctctggcgacccgtgaagccgcagctttcaaggcggatggaggtggcgctatcgttgagctaaccacgggcggtattgttccggatccagaaggcctggctgcaatcgcccgcggtgccgggattcatgtggtattgggtgcgggcttctacaccgaaaactttctggacgctgaaactcttgctctgtccacagaggcattgactgaaatcaccctgggccagttaaccgaaggtgcatggggaactaaagtgcgttgtggtctgatcggcgagatcggatgcagctggccgctgacgcctttcgaacgccgttcactgaaatctggtgctcgtgcacagattgctactggcgcggctatcaccattcacccgggtcgcgaccgcgcggcaccggatgagatcctggacgttctggaagcggaaggcgctgatctatcgcgtgtcgttataggtcacatggaccgtacactgctggacgatgcagatgttgttgcactcgctcgccgtggtagcatcgtagagtatgatttcttcggcatcgaacactctaactactggctgggggtggtagacattcctaacgattggatgcgtatccgggcgctgagaaaattgtttgacgccggtcttggagacagggtcgtaatcagccatgatatttgcactcgtacccgtctgcaatccctgggcggccatggttacgggcacatcctgcgcaacgtggttccgcttatgcgcgatcgtggtttcagtcagtctgaaatcgacctcctgctgctggaaaccccacgacgtattctgaccattggtggg

SEQ ID NO: 16 - DNA, 1008 bp, Artificial Sequence
  Synthetic
atgattggcacgggtgatcgaatcaatactgtacgtggccctatcaccataagcgaggcgggtttcacactgactcatgaacacatctgtggatcctctgctggttttttacgcgcgtggccggaatttttcggctcgaggaaagctctggcggaaaaagcagttcggggtctgcgtcgcgctcgtgccgcaggcgttagaaccattgtggacgtatcaaccttcgatatcggtcgtgacgtcagccttctggcagaggtttctcgtgctgccgacgtacacattgtggctgcaactggtctgtggttcgatccacccctgtccatgcgtctgcgctcagttgaagagctgactcagtttttcctccgtgaaatccagtatggtatcgaagataccggcatccgcgctggaatcattaaagttgcgaccacggggaaagccaccccgttccaggaattggtactgaaagctgcggcacgtgcgtccctcgcaactggcgtcccggttactacgcacacggctgcttctcagcgcgacggcgaacagcaggcagccatttttgaaagcgagggtctgtccccgtctagggtctgcatcggccatagcgacgacaccgatgatttaagctacttaacagcactggccgcccgtgggtacctgataggcctggatcatatcccgcacagcgctatcggactggaagacaacgcgagtgcttctgctctgctgggtattcgttcctggcaaactagagcactgctgatcaaggctctgattgatcaggggtacatgaaacaaatccttgtgagcaacgactggctgttcggtttcagttcgtatgttaccaacatcatggacgttatggatcgcgtgaaccctgacggtatggcgttcattccgttgagagtgatcccattcctgcgtgagaaaggcgtaccccaggaaaccctggccggtatcactgtaacaaatccggctcgctttctgtctccgactctgcgcgcatct

SEQ ID NO: 17 - DNA, 1050 bp, Homo sapiens
atgtcttccttaagtggaaaagtccaaaccgttttgggccttgtagagccaagcaaactgggccgtaccctgacccatgaacacctggccatgacctttgactgctgttactgtccacctcccccgtgccaggaagctatttccaaagaacctatcgtgatgaaaaatttatattggattcagaaaaacgcctattcccataaagaaaaccttcaattaaatcaggagacagaagccataaaggaagaactgttgtattttaaagctaatggtggaggggctttggtggaaaacacaaccactgggattagccgagacacacagacgttgaagaggcttgcagaagagactggcgtccatatcatatctggagccgggttttatgtggatgcaactcactcctcagagaccagggccatgtcagtggagcagcttaccgatgtccttatgaatgaaattctccatggagctgatggaaccagtatcaagtgtggcattattggagaaattggttgctcctggcctttgactgagagtgaaagaaaggttctccaggccacagctcatgcccaggctcagcttggttgtcctgttattatccatcctggacggagctccagggcaccatttcagattatccgaatattgcaagaagcaggcgcagacatctccaaaacagtcatgtcacacctggataggactattcttgataagaaagagctcttggagtttgctcaacttggctgctacttggaatatgatctctttggtactgaactacttcattaccaactcggcccagatattgacatgcctgatgataacaaaagaattagaagggtgcgtctcctggtggaagagggctgtgaagatcgaattctggtagcacatgacatacatacgaaaacccggctgatgaaatatggaggtcacggctattctcatatactcaccaatgttgttcctaaaatgttgctgagaggcataactgagaatgtgcttgataagattctaatagagaaccctaagcaatggctaactttcaaatag

SEQ ID NO: 18 - protein, 365 aa, Brevundimonas diminuta
MQTRRVVLKSAAAAGTLLGGLAGCASVAGSIGTGDRINTVRGPITISEAGFTLTHEHICGSSAGFLRAWPEFFGSRKALAEKAVRGLRRARAAGVRTIVDVSTFDIGRDVSLLAEVSRAADVHIVAATGLWFDPPLSMRLRSVEELTQFFLREIQYGIEDTGIRAGIIKVATTGKATPFQELVLKAAARASLATGVPVTTHTAASQRDGEQQAAIFESEGLSPSRVCIGHSDDTDDLSYLTALAARGYLIGLDHIPHSAIGLEDNASASALLGIRSWQTRALLIKALIDQGYMKQILVSNDWLFGFSSYVTNIMDVMDRVNPDGMAFIPLRVIPFLREKGVPQETLAGITVTNPARFLSPTLRAS

SEQ ID NO: 19 - DNA, 1095 bp, Artificial Sequence
  Synthetic
atgcaaacccgtcgcgtcgtattaaaatcagctgcggcagccgggactctgttgggtggcctcgctggttgcgcatctgtggcgggcagtatcggtacgggcgatcgtattaacactgttaggggtccaatcaccatttcggaagccggctttacccttacacacgagcatatctgtggctcctctgctggtttcctgcgcgcttggcctgaatttttcggtagccgtaaggctctggcagaaaaagcggttcgtggcctgcgccgtgctcgtgccgcgggcgtgcgcactatagttgacgtcagcaccttcgatatcggacgcgacgtatccctgctggcagaggtttctcgggcggcggatgtacacatcgtggctgctactggactatggttcgaccccccgctgtctatgcgtctgcgcagcgtcgaagaactgacgcagttctttctgcgtgaaattcagtatggtatcgaggacaccggcatccgtgctggtatcattaaagttgcgactaccgggaaggcaacgccgttccaggaactggtgctgaaagctgccgcaagagcaagcttggctaccggtgtgccagttactactcatacggcagcctcccagagagatggcgaacaacaggctgctatttttgaatcagaaggtctgtcgccgtctagggtttgcatcggtcacagcgacgacacagatgacctgtcctacctcaccgcgctggccgcacgcggctacctgatcggtctggatcacattcctcacagtgcaatcggcctagaggataatgcgtctgcgtccgctttattaggcatacgaagctggcagacccgcgctctcctcatcaaagctctgatcgaccagggctatatgaaacaaatcctggtaagtaacgattggctgttcggtttctcttcttacgtaactaacataatggacgttatggatcgcgttaacccggatggtatggcatttattccgctgcgtgtaatcccgtttttacgtgaaaagggtgttccgcaggaaaccctggctggtattaccgtgactaatccggcccgtttcctgagcccgactctacgggcttcc

SEQ ID NO: 20 - protein, 238 aa, Artificial Sequence
  Synthetic
MRKGEELFTGVVPILVELDGDVNGHKFSVRGEGEGDATNGKLTLKFICTTGKLPVPWPTLVTTLTYGVQCFARYPDHMKQHDFFKSAMPEGYVQERTISFKDDGTYKTRAEVKFEGDTLVNRIELKGIDFKEDGNILGHKLEYNFNSHNVYITADKQKNGIKANFKIRHNVEDGSVQLADHYQQNTPIGDGPVLLPDNHYLSTQSVLSKDPNEKRDHMVLLEFVTAAGITHGMDELYK

SEQ ID NO: 21 - DNA, 714 bp, Artificial Sequence
  Synthetic
atgcgtaaaggcgaagagctgttcactggtgtcgtccctattctggtggaactggatggtgatgtcaacggtcataagttttccgtgcgtggcgagggtgaaggtgacgcaactaatggtaaactgacgctgaagttcatctgtactactggtaaactgccggtaccttggccgactctggtaacgacgctgacttatggtgttcagtgctttgctcgttatccggaccatatgaagcagcatgacttcttcaagtccgccatgccggaaggctatgtgcaggaacgcacgatttcctttaaggatgacggcacgtacaaaacgcgtgcggaagtgaaatttgaaggcgataccctggtaaaccgcattgagctgaaaggcattgactttaaagaagacggcaatatcctgggccataagctggaatacaattttaacagccacaatgtttacatcaccgccgataaacaaaaaaatggcattaaagcgaattttaaaattcgccacaacgtggaggatggcagcgtgcagctggctgatcactaccagcaaaacactccaatcggtgatggtcctgttctgctgccagacaatcactatctgagcacgcaaagcgttctgtctaaagatccgaacgagaaacgcgatcatatggttctgctggagttcgtaaccgcagcgggcatcacgcatggtatggatgaactgtacaaa

SEQ ID NO: 22 - protein, 326 aa, Mycobacterium kansasii
MSELNTARGPIDTADLGVTLMHEHVFIMTTEVVQNYPDAWGDEDKRVADAVARLNELKSRGVDTIVDLTVIGLGRYIPRIARVAAQTELNIVVATGLYTYNDVPFCFHYLGPGTQLDGPETMTDLFVRDIEQGIADTGIKAGILKCATDEPGITPGVERVLRAVAQAHKRTGVPISTHTHAGLRRGLEQQRIFEEEGVDLSRVVIGHSGDSTDVGYLEELIAAGSYLGMDRFGLDVILPFEDRVNIVAQMCERGHADKMVLSHDANCYFDALPEALLPVAAPNWNYLHIHNDVIPALKQRGVTDEQLHTMLVDNPRRIFERQGAYE

SEQ ID NO: 23 - DNA, 978 bp, Artificial Sequence
  Synthetic
atgtccgaactgaatacggcacgtgggccaatcgatacagccgacctaggcgtgacccttatgcacgagcatgtctttattatgactaccgaagttgttcagaactaccctgacgcgtggggtgatgaagataaacgcgtagctgacgctgtggcacgtttaaacgagttgaagagcaggggcgttgacactatcgtagatctgaccgtgataggtctgggtcgttatatcccgcgcatcgcgcgagttgcggcccaaactgaacttaacattgttgtcgctactggcctctacacctacaatgacgtaccgttctgcttccactatctgggaccgggcacgcagctggatggccccgaaaccatgactgacctgttcgtgagagatatcgaacagggtattgcagatactggcatcaaagctggtatcctgaaatgtgctaccgacgagccggggattacacctggtgttgaacgcgttctgcgtgcggtcgctcaggcgcataaacgtaccggtgtcccgatctctacgcacactcatgccggcctgcgtcgcggtctggaacaacagcgtatctttgaagaggaaggtgtagacttaagtcgtgtagtgattggccactctggcgacagcaccgatgttggatacttggaagagctgatcgccgctggttcatacctgggcatggaccgcttcggcctggatgttatcctaccgttcgaggaccgggttaacattgttgcacagatgtgcgaacgtggccatgcggataaaatggtactgtctcacgatgctaactgttattttgacgccctgccagaagcactcctgccagtcgctgctccgaactggaactacctgcacatccacaacgatgtgattccggctctcaagcagcgcggtgtcacggatgaacagctgcacactatgctggttgacaatccgcgccgtattttcgaacgtcagggtgcgtacgaa

SEQ ID NO: 24 - protein, 327 aa, Desulfatibacillum alkenivorans
MATVNTVLGPISSDDLGVTLMHEHILYGYPGWDGDRTIAPLDRQAIVAAGVETLKQLKDEYGLNSYVDATALDGGRMPDILKEVSEKSGVNIICSTGYYYEGEGSPTYWKFRSSLGDVSGELYDLFMTEVTQGIMDTGIKAGALKVGSSKGEITDYEKIMFQTAARVSKETGVPIITHTQEGTMGPEQAELLIAAGANPKQIQIGHMSDNVDIQYQEETFKHGVYVSWDRMGLQGLVGCPMDAERIPVMIELIKKGYADKMMISHDFIITWLGRPLNLPEEALPLIANWHPSHLFKNIIPAFKEAGVTDDQINSIIKENPRRLFAGE

SEQ ID NO: 25 - DNA, 981 bp, Artificial Sequence
  Synthetic
atggccacagttaataccgtgctcggacccatcagctccgacgatttgggcgtaactctgatgcatgaacacattttatacgggtatcctggttgggatggcgaccgtacgatcgcaccactggaccgccaggctatagttgcggctggtgtcgagactctgaagcaactgaaagatgaatacggtcttaactcttacgtggacgcgaccgctctggatggcggtcgtatgccggatattctaaaagaagtttcagagaaaagcggcgtgaacatcatctgttctactggttattactacgaaggcgaaggatcgccgacctattggaaatttcgaagttctctgggggacgtcagcggcgaactctacgacctgttcatgaccgaggttactcagggtattatggataccggcatcaaggcaggcgccctgaaagtaggttccagtaaaggtgaaatcacggactacgaaaaaattatgttccagacagcggctcgcgtatcgaaagagactggggttccgatcatcacgcacacccaggaaggtactatgggtccggaacaagcagagttgttaattgctgcgggcgctaacccgaagcagatacagatcggacatatgtccgacaacgtagatattcagtatcaggaagaaacttttaaacacggtgtctacgtttcttgggatcggatgggcctgcaaggcctggtaggttgcccaatggacgccgaacgtatcccggttatgatcgaactgatcaagaaaggctacgccgataaaatgatgatatcccacgatttcattatcacctggctggggaggccgctgaatctgcctgaagaggcactgccgctgatcgctaactggcatccatctcacctattcaaaaacatcattccggctttcaaagaagctggtgtgaccgatgaccaaatcaacagcatcattaaagagaacccccgtcgtctgtttgccggtgaa

SEQ ID NO: 26 - protein, 366 aa, Unknown
  Rhizobiaceae bacterium
MSATELSEAHTGSGKVMTVNGPVNASALGVTLMHEHVLNDCTCWWNPPKTPERQHLADSFICMEILSELRQDPFVNRHNITLDDEKLAITELKSFFDAGGRTLVEPTCQGIGRNPEAMQRIADATGLNIVIGAGYYLQDSHPEKLAGMSAEAIADEIVGEAVEGVDGTGVRIGLIGEIGVSGDFTEAERKSLRGAAQAQARTGLPLMVHLPGWFRLGHEVLDIAAAEGADLRHTVLCHMNPSHDDFPYQSELAARGAFLEYDMIGMDFFYADQQVQCPSDEECARAIVRLVDAGHEGRILLSHDVFLKMMLTHYGGNGYAFILKHFLPRLARHGLDHDVLTRLMKDNPRAVFDADFASQRNKTELK

SEQ ID NO: 27 - DNA, 1098 bp, Artificial Sequence
  Synthetic
atgtcagctacggaactttccgaggcgcataccggtagtgggaaagtaatgactgtgaatggcccggttaacgcctctgcactgggtgtcaccttaatgcacgaacacgttctgaacgattgtacttgctggtggaacccacctaagacaccggaacgccagcacttggctgacagctttatttgcatggaaatcctctctgagctgagacaagacccgttcgtgaaccgtcataatatcactctggatgacgaaaaactggcgattactgagctgaaatcgttctttgatgcaggcggacgcaccctggttgaacccacttgccagggcatcggtcgtaacccggaggctatgcagcgtatagcggacgctaccggtctgaacatcgtaattggcgccggttactatctgcaagatagccacccggaaaaactggctggtatgtctgcggaagcaattgccgacgaaatcgtcggcgaggctgttgaaggcgttgatggcaccggtgtgaggatcgggctaatcggcgaaatcggtgtatccggtgacttcacggaagcagaacgtaagtcgctgcgcggcgctgcccaggctcaggcgcgtacgggactgcctttaatggttcatctgccgggttggttccgtctgggccacgaggtgctagatatcgcagctgcggaaggggcagatcttcgccacaccgtactgtgtcacatgaaccccagccatgacgattttccgtaccagtccgaactggcagctcggggcgccttcctggaatatgacatgattggcatggacttcttctacgcagaccagcaggtccagtgcccatctgacgaagagtgtgcgcgtgctatcgttcggctggtagatgcaggtcacgagggtcgcattttgctttcgcacgatgttttcctgaaaatgatgctgacacattacggaggtaatggttatgcgtttatcctgaaacattttctgccgcgtcttgctcgccacggcctggaccacgacgttctgactcgtctgatgaaagataacccgcgtgcagtattcgatgcggatttcgctagccagcgcaacaagaccgaactcaaa

SEQ ID NO: 28 - protein, 344 aa, Providencia heimbachae
MMKDYIQTVTGPVKKEDMGLTLPHEHLFNDLSTVVDEPFYDFSHVLVDKKVTADIQWGLKHDPYCCCDNMDTKPIEDVIYEVNNFKELGGRTLVDATGSKAIGRDVRQLREVSIKTGINVVASSGLYIEKFEGDRLVNDIEAMAKIIDDELNVGIDGTDIRAGMIGEIGVSPYFTDGEKNSLRAASLAQIANDHVSMNIHMPGWQRRGDEVLDILIKEMGVNPAKISLAHSDPSGKDFDYQRRMLDRGVWLEFDMIGLDISFPKEGIAPTVTETVDAVFKLIEMGYEKQIVLSHDVFLKQMWAKNGGNGWGFVPNVFLSLLSKRGVDKRIIDRLCIDNPANLLA

SEQ ID NO: 29 - DNA, 1032 bp, Artificial Sequence
  Synthetic
atgatgaaagattacatccaaacagttaccgggccagtgaagaaagaagacatgggccttactctgccgcatgagcacctctttaatgatttgtcgactgtcgtagacgaaccgttctatgacttcagtcacgttctggtagataaaaaagttaccgccgatattcagtggggtctgaaacatgacccttactgctgttgcgataacatggacacgaagcccatcgaagatgtgatatacgaggtcaacaactttaaagaattaggtggccgcaccctggttgacgcaactggttccaaagcgatcggacgtgacgtgcgtcagctgagagaagtgtctattaagaccggtatcaacgttgtagcttctagcggcctgtatatcgaaaaattcgagggcgatcgtctggttaatgacatcgaagctatggccaagattattgatgacgaactcaacgttggtatcgatggcactgatattcgcgcaggtatgatcggtgaaatcggcgtatcaccgtacttcactgacggtgagaaaaacagcttacgtgctgcgtccctggctcagatagctaacgaccacgtatctatgaacatccacatgccgggctggcagcgccgtggggatgaggtgctggacatcctgattaaagaaatgggcgtgaatccggcgaaaatcagcctggcacatagcgacccatccggtaaagattttgattaccaaaggcgcatgctggaccgaggagtctggcttgaatttgatatgatcggcctggatatttccttcccgaaggaaggtatcgcgccgaccgttactgagacagttgacgcagttttcaaattaatcgaaatgggttatgaaaaacagattgttctgtctcacgacgtgttcctgaagcagatgtgggctaaaaacggaggcaacggttggggcttcgtccctaatgtattcctgtccctgctgtcgaaacgtggggttgataagcgtatcattgaccgtttgtgcatcgacaacccagctaacctgctagcc

SEQ ID NO: 30 - protein, 372 aa, Pricia antarctica
MRRRKKGALGNLQLSAFPKEWFYTLGDKIFEMKKLVEHFLILLLAIFPSVALAQIITVTGPIEPEEMGLALIHEHIMVDWIGADSTGQHRWDRNEIVERALPYLKEIKEYGVTTFLDCTPAYLGRDPYVLKKLADRTGIHILTNTGYYGSGNNKYIPEGLMNTSAKEMAFHWIREFEHGIDGSGIRPGFIKISVENEEILSEIHRNLIEAAGLTHLKTGMAIVSHTGGDSPAMAQIRVLKEMGVSPSAFVWTHAQNGTMNGYLQAASQGAWISLDNIDGGTSNDTEGTGNIDWFVKTLLELKDRGILDHILISHDAGWYNVGEKNGGYYKGYTDLFTQLIPRLKQNGFTQKDIDLVLMENPKRAYAIHIRKE

SEQ ID NO: 31 - DNA, 1116 bp, Artificial Sequence
  Synthetic
atgcgccgtcgtaaaaagggagcactcggtaacctgcaattgtctgcgttcccaaaagagtggttttacaccctgggggataaaatcttcgaaatgaaaaagttagtagaacattttctgattctgcttctggctatcttccctagtgtggccctggctcagataatcactgtcacaggtccgatcgaacccgaggaaatgggcctggctctgattcacgaacacatcatggttgactggattggcgcggacagcacgggccagcatcgctgggatcgtaatgagatcgttgaaagagcactgccgtatctcaaagaaattaaagaatacggtgtgactaccttcctagactgtaccccggcgtacctgggccgagatccgtatgttctgaaaaaattagctgaccgtaccggtatccacatcctgactaacactggttactatggctcaggtaacaacaaatacatcccagaaggactgatgaatacgtccgccaaggagatggctttccactggattcgtgaatttgaacatggcattgatggtagcggcatccgcccgggttttattaaaatctccgttgagaacgaagaaatcctttctgagatccaccgtaacctgattgaagcagctggactcacccacttaaagactggcatggcgattgtgagtcataccgggggtgattcgcctgcaatggcccagatacgcgtactgaaagagatgggcgtaagcccgtctgcgttcgtttggacacatgcacagaacggtactatgaacggctacctgcaagctgcgtcccagggtgcttggatcagcctagacaatatcgatgggggcacttctaacgacactgaaggtacgggcaacatcgactggttcgtaaaaaccttgctggaactgaaagatcgtggcatcctggaccacattctgatctcccacgacgcaggttggtacaacgttggtgaaaagaacggtggctattacaaaggttatacggacctgttcacccagctgataccgcgcctgaaacagaatggctttacccagaaagatatcgacctggtgctgatggagaaccctaaacgtgcctacgcaattcacatccggaaggaa

SEQ ID NO: 32 - protein, 343 aa, Proteus mirabilis
MKGYIQTVTGPVKKEDMGLTLPHEHLFNDLSGVVDEPFYEFSHVLVDKKVSADIQWGLKYDPYCCCDNMDKKPIEDVIFELNNFKELGGRTIVDATGSSSIGRDIRKLRQVAEITGINVVASSGLYIEKFEGERLADDIDAMAKIIDDELNVGIDGTDIRAGMIGEIGVSPFFTDGEKNSLRAAAIAQNSNPHASMNIHMPGWQRRGDEVLDILLTEMGCNPAKISLAHSDPSGKDIDYQCKMLDRGVWLEFDMIGLDISFPKEGAAPSVMDTVEAVATLIERGYGSQIVLSHDVFLKQMWAKNGGNGWGFVPNVFLSLLAQRGIDKSIIKKLCVENPANLLA

SEQ ID NO: 33 - DNA, 1029 bp, Artificial Sequence
  Synthetic
atgaaaggctatattcaaaccgtgacaggtcctgttaagaaagaagatatggggctgacgcttccacacgagcatctgtttaacgacttgagcggtgtcgtagacgaaccgttctacgaattttcccacgttctagtagataaaaaggtgtctgccgacatccagtggggcttaaaatacgatccctattgctgttgcgacaatatggataaaaaaccgatcgaggacgttatcttcgaactgaacaacttcaaagaactcggtggtcgcactattgttgatgctactggcagttcgtctattggccgggacatccgtaaactgcgccaggtggcggagatcaccggaataaacgtcgttgcaagctcaggtctgtacatcgaaaagttcgaaggcgaacgtctggctgatgatatcgacgcaatggctaaaattatcgacgacgaactgaacgtcggcatcgacggtaccgatattcgtgcgggtatgattggcgagatcggtgtttctccgttctttactgatggcgaaaagaatagcctgagggctgcggccattgctcagaactccaacccgcacgcatcaatgaatatccatatgccgggctggcaacgtcgtggcgatgaagtactggatatcttactgaccgaaatgggttgcaaccctgcaaaaatttctctggcgcatagcgacccgagcgggaaagatatcgactaccagtgtaaaatgcttgaccgtggtgtgtggctggaatttgatatgatcggtctggatataagtttcccaaaggagggcgcggctccgtccgtaatggacactgttgaggcagtggccaccctgatcgaacgcgggtatggaagtcagattgtcctgtctcacgatgttttcctgaaacagatgtgggctaagaacggtggaaacggttggggattcgtgccgaacgttttcctctccttgctggctcagagaggcatcgacaaatctatcattaaaaaactgtgcgtagaaaacccagccaatctgctggca

SEQ ID NO: 34 - protein, 344 aa, Salmonella enterica subsp. enterica serovar
MKGFLQTVTGPVAHTDMGLTLPHEHLFNDLSSVVDEPHYTFSQQLVGKKVSADLQWGLKHDPYCCADNMDRKEIDDVIFEINNFMSLGGRTIVDATGSESIGRDASALREVALKTGLNIVASSGPYLEKFESTRIHKPVELLASLIDKELNQGIGETDIRAGMIGEIGVSPAFTQAERNSLRAASLAQCNNPHTAMNIHMPGWLRLGDEVLDIVLEEMNVSPAKVSLAHSDPSGKDVVYQRKMLDRGVWLEFDMIGLDITFPKEGVAPGVQETADAVANLIALGYADQIVLSHDVFLKQMWAKNGGNGWGFVPNVFLAYLAARGVDNDTLRKLCIDNPARLLTA

SEQ ID NO: 35 - DNA, 1032 bp, Artificial Sequence
  Synthetic
atgaagggatttctccaaactgttaccggtccagtcgcgcatacggatatgggcctgaccttgcctcacgagcacctgttcaacgacttatcctctgtagttgatgaaccgcattacactttcagtcagcagctggtggggaaaaaagtgtcagctgacctgcaatggggcctgaaacacgacccgtattgttgcgcagataatatggatcgcaaggaaatcgacgacgtcatttttgaaatcaacaacttcatgtctctgggtggccgtaccattgttgatgccactggtagcgaaagcatcggtcgagatgcttcggcgcttcgtgaggtagctctaaaaacaggcctgaatatcgttgcatcctctggtccgtacctggaaaaattcgaaagcacccgcatacataaacccgtggagctgctggctagcctgatcgacaaagaactgaaccagggcattggggagactgacatccgtgcgggcatgatcggtgaaattggtgtttccccggcatttactcaggcggaacgtaactctttacgtgctgcctccctggcacagtgcaacaatccgcacaccgccatgaacatccacatgccaggctggttacgcctgggcgatgaggttctggacatcgtgctggaagaaatgaacgtatctccggctaaggttagcctcgctcacagcgatcctagtggtaaagatgtcgtttatcagcggaaaatgctggaccgtggagtatggctggaatttgacatgattggcttggatattaccttcccgaaagaaggtgtagcgccgggtgtgcaggaaactgccgacgctgttgctaacctgatcgcgctgggctacgcagaccagattgtactgtcccatgatgtgttcctaaagcaaatgtgggcgaaaaacggcggtaacggctggggtttcgttcccaatgttttcctggcatacctggccgctagaggcgtggataacgacaccttgcgcaaactgtgcatcgacaatccagccaggctgcttactgca

SEQ ID NO: 36 - protein, 326 aa, Artificial Sequence
  Synthetic
MSELNTARGAIDTTDLGVTLMSEHVFIMTTEIALNYPEAWGDEDKRVADAVSRLNELKARGVDTIVDLTVIGLGRYIPRIARVAAATELNIVVATGLYTYNDVPFRFHYEGPGGMLDGPEIMTEMFVRDIEQGIADTGVKAGILKCATDEPGITPGVERVLRAVAQAHKRTGVPISTHTHAGLRRGLEQQRIFEEEGVDLTRVVIGHSGDSTDIGYLEELIAAGSYLGMDRFGLDVISPFEERVKIVAQMCERGHADKMVLSHDANCYFDALPEELVPQMAPNWHYLHIHNDVIPALKERGVTDEQLKTMLVDNPRRIFERQGAYE

SEQ ID NO: 37 - protein, 326 aa, Artificial Sequence
  Synthetic
MSELNTARGAIDTTDLGVTLMTEHVFIMTTEIALNYPEAWGDEDKRVADAVSRLNELKARGVDTIVDLTVIGLGRYIPRIARVAAATELNIVVATGLYTYNDVPFRFHYEGPGGMLDGPEIMTEMFVRDIEQGIADTGVKAGILKCATDEPGITPGVERVLRAVAQAHKRTGVPISTHTHAGLRRGLEQQRIFEEEGVDLTRVVIGHSGDSTDIGYLEELIAAGSYLGMDRFGLDVISPFEERVKIVAQMCERGHADKMVLSHDANCYFDALPEELVPQMAPNWHYLHIHNDVIPALKERGVTDEQLKTMLVDNPRRIFERQGAYE

SEQ ID NO: 38 - protein, 326 aa, Artificial Sequence
  Synthetic
MSELNTARGAIDTTDLGVTLMHDHVFIMTTEIALNYPEAWGDEDKRVADAVSRLNELKARGVDTIVDLTVIGLGRYIPRIARVAAATELNIVVATGLYTYNDVPFRFHYEGPGGMLDGPEIMTEMFVRDIEQGIADTGVKAGILKCATDEPGITPGVERVLRAVAQAHKRTGVPISTHTHAGLRRGLEQQRIFEEEGVDLTRVVIGHSGDSTDIGYLEELIAAGSYLGMDRFGLDVISPFEERVKIVAQMCERGHADKMVLSHDANCYFDALPEELVPQMAPNWHYLHIHNDVIPALKERGVTDEQLKTMLVDNPRRIFERQGAYE

SEQ ID NO: 39 - protein, 326 aa, Artificial Sequence
  Synthetic
MSELNTARGAIDTTDLGVTLMHENVFIMTTEIALNYPEAWGDEDKRVADAVSRLNELKARGVDTIVDLTVIGLGRYIPRIARVAAATELNIVVATGLYTYNDVPFRFHYEGPGGMLDGPEIMTEMFVRDIEQGIADTGVKAGILKCATDEPGITPGVERVLRAVAQAHKRTGVPISTHTHAGLRRGLEQQRIFEEEGVDLTRVVIGHSGDSTDIGYLEELIAAGSYLGMDRFGLDVISPFEERVKIVAQMCERGHADKMVLSHDANCYFDALPEELVPQMAPNWHYLHIHNDVIPALKERGVTDEQLKTMLVDNPRRIFERQGAYE

SEQ ID NO: 40 - protein, 326 aa, Artificial Sequence
  Synthetic
MSELNTARGAIDTTDLGVTLMHEHIFIMTTEIALNYPEAWGDEDKRVADAVSRLNELKARGVDTIVDLTVIGLGRYIPRIARVAAATELNIVVATGLYTYNDVPFRFHYEGPGGMLDGPEIMTEMFVRDIEQGIADTGVKAGILKCATDEPGITPGVERVLRAVAQAHKRTGVPISTHTHAGLRRGLEQQRIFEEEGVDLTRVVIGHSGDSTDIGYLEELIAAGSYLGMDRFGLDVISPFEERVKIVAQMCERGHADKMVLSHDANCYFDALPEELVPQMAPNWHYLHIHNDVIPALKERGVTDEQLKTMLVDNPRRIFERQGAYE

SEQ ID NO: 41 - protein, 326 aa, Artificial Sequence
  Synthetic
MSELNTARGAIDTTDLGVTLMHEHMFIMTTEIALNYPEAWGDEDKRVADAVSRLNELKARGVDTIVDLTVIGLGRYIPRIARVAAATELNIVVATGLYTYNDVPFRFHYEGPGGMLDGPEIMTEMFVRDIEQGIADTGVKAGILKCATDEPGITPGVERVLRAVAQAHKRTGVPISTHTHAGLRRGLEQQRIFEEEGVDLTRVVIGHSGDSTDIGYLEELIAAGSYLGMDRFGLDVISPFEERVKIVAQMCERGHADKMVLSHDANCYFDALPEELVPQMAPNWHYLHIHNDVIPALKERGVTDEQLKTMLVDNPRRIFERQGAYE

SEQ ID NO: 42 - protein, 326 aa, Artificial Sequence
  Synthetic
MSELNTARGAIDTTDLGVTLMHEHVFCMTTEIALNYPEAWGDEDKRVADAVSRLNELKARGVDTIVDLTVIGLGRYIPRIARVAAATELNIVVATGLYTYNDVPFRFHYEGPGGMLDGPEIMTEMFVRDIEQGIADTGVKAGILKCATDEPGITPGVERVLRAVAQAHKRTGVPISTHTHAGLRRGLEQQRIFEEEGVDLTRVVIGHSGDSTDIGYLEELIAAGSYLGMDRFGLDVISPFEERVKIVAQMCERGHADKMVLSHDANCYFDALPEELVPQMAPNWHYLHIHNDVIPALKERGVTDEQLKTMLVDNPRRIFERQGAYE

SEQ ID NO: 43 - protein, 326 aa, Artificial Sequence
  Synthetic
MSELNTARGAIDTTDLGVTLMHEHVFDMTTEIALNYPEAWGDEDKRVADAVSRLNELKARGVDTIVDLTVIGLGRYIPRIARVAAATELNIVVATGLYTYNDVPFRFHYEGPGGMLDGPEIMTEMFVRDIEQGIADTGVKAGILKCATDEPGITPGVERVLRAVAQAHKRTGVPISTHTHAGLRRGLEQQRIFEEEGVDLTRVVIGHSGDSTDIGYLEELIAAGSYLGMDRFGLDVISPFEERVKIVAQMCERGHADKMVLSHDANCYFDALPEELVPQMAPNWHYLHIHNDVIPALKERGVTDEQLKTMLVDNPRRIFERQGAYE

SEQ ID NO: 44 - protein, 326 aa, Artificial Sequence
  Synthetic
MSELNTARGAIDTTDLGVTLMHEHVFEMTTEIALNYPEAWGDEDKRVADAVSRLNELKARGVDTIVDLTVIGLGRYIPRIARVAAATELNIVVATGLYTYNDVPFRFHYEGPGGMLDGPEIMTEMFVRDIEQGIADTGVKAGILKCATDEPGITPGVERVLRAVAQAHKRTGVPISTHTHAGLRRGLEQQRIFEEEGVDLTRVVIGHSGDSTDIGYLEELIAAGSYLGMDRFGLDVISPFEERVKIVAQMCERGHADKMVLSHDANCYFDALPEELVPQMAPNWHYLHIHNDVIPALKERGVTDEQLKTMLVDNPRRIFERQGAYE

SEQ ID NO: 45 - protein, 326 aa, Artificial Sequence
  Synthetic
MSELNTARGAIDTTDLGVTLMHEHVFFMTTEIALNYPEAWGDEDKRVADAVSRLNELKARGVDTIVDLTVIGLGRYIPRIARVAAATELNIVVATGLYTYNDVPFRFHYEGPGGMLDGPEIMTEMFVRDIEQGIADTGVKAGILKCATDEPGITPGVERVLRAVAQAHKRTGVPISTHTHAGLRRGLEQQRIFEEEGVDLTRVVIGHSGDSTDIGYLEELIAAGSYLGMDRFGLDVISPFEERVKIVAQMCERGHADKMVLSHDANCYFDALPEELVPQMAPNWHYLHIHNDVIPALKERGVTDEQLKTMLVDNPRRIFERQGAYE

SEQ ID NO: 46 - protein, 326 aa, Artificial Sequence
  Synthetic
MSELNTARGAIDTTDLGVTLMHEHVFHMTTEIALNYPEAWGDEDKRVADAVSRLNELKARGVDTIVDLTVIGLGRYIPRIARVAAATELNIVVATGLYTYNDVPFRFHYEGPGGMLDGPEIMTEMFVRDIEQGIADTGVKAGILKCATDEPGITPGVERVLRAVAQAHKRTGVPISTHTHAGLRRGLEQQRIFEEEGVDLTRVVIGHSGDSTDIGYLEELIAAGSYLGMDRFGLDVISPFEERVKIVAQMCERGHADKMVLSHDANCYFDALPEELVPQMAPNWHYLHIHNDVIPALKERGVTDEQLKTMLVDNPRRIFERQGAYE

SEQ ID NO: 47 - protein, 326 aa, Artificial Sequence
  Synthetic
MSELNTARGAIDTTDLGVTLMHEHVFKMTTEIALNYPEAWGDEDKRVADAVSRLNELKARGVDTIVDLTVIGLGRYIPRIARVAAATELNIVVATGLYTYNDVPFRFHYEGPGGMLDGPEIMTEMFVRDIEQGIADTGVKAGILKCATDEPGITPGVERVLRAVAQAHKRTGVPISTHTHAGLRRGLEQQRIFEEEGVDLTRVVIGHSGDSTDIGYLEELIAAGSYLGMDRFGLDVISPFEERVKIVAQMCERGHADKMVLSHDANCYFDALPEELVPQMAPNWHYLHIHNDVIPALKERGVTDEQLKTMLVDNPRRIFERQGAYE

SEQ ID NO: 48 - protein, 326 aa, Artificial Sequence
  Synthetic
MSELNTARGAIDTTDLGVTLMHEHVFMMTTEIALNYPEAWGDEDKRVADAVSRLNELKARGVDTIVDLTVIGLGRYIPRIARVAAATELNIVVATGLYTYNDVPFRFHYEGPGGMLDGPEIMTEMFVRDIEQGIADTGVKAGILKCATDEPGITPGVERVLRAVAQAHKRTGVPISTHTHAGLRRGLEQQRIFEEEGVDLTRVVIGHSGDSTDIGYLEELIAAGSYLGMDRFGLDVISPFEERVKIVAQMCERGHADKMVLSHDANCYFDALPEELVPQMAPNWHYLHIHNDVIPALKERGVTDEQLKTMLVDNPRRIFERQGAYE

SEQ ID NO: 49 - protein, 326 aa, Artificial Sequence
  Synthetic
MSELNTARGAIDTTDLGVTLMHEHVFNMTTEIALNYPEAWGDEDKRVADAVSRLNELKARGVDTIVDLTVIGLGRYIPRIARVAAATELNIVVATGLYTYNDVPFRFHYEGPGGMLDGPEIMTEMFVRDIEQGIADTGVKAGILKCATDEPGITPGVERVLRAVAQAHKRTGVPISTHTHAGLRRGLEQQRIFEEEGVDLTRVVIGHSGDSTDIGYLEELIAAGSYLGMDRFGLDVISPFEERVKIVAQMCERGHADKMVLSHDANCYFDALPEELVPQMAPNWHYLHIHNDVIPALKERGVTDEQLKTMLVDNPRRIFERQGAYE

SEQ ID NO: 50 - protein, 326 aa, Artificial Sequence
  Synthetic
MSELNTARGAIDTTDLGVTLMHEHVFPMTTEIALNYPEAWGDEDKRVADAVSRLNELKARGVDTIVDLTVIGLGRYIPRIARVAAATELNIVVATGLYTYNDVPFRFHYEGPGGMLDGPEIMTEMFVRDIEQGIADTGVKAGILKCATDEPGITPGVERVLRAVAQAHKRTGVPISTHTHAGLRRGLEQQRIFEEEGVDLTRVVIGHSGDSTDIGYLEELIAAGSYLGMDRFGLDVISPFEERVKIVAQMCERGHADKMVLSHDANCYFDALPEELVPQMAPNWHYLHIHNDVIPALKERGVTDEQLKTMLVDNPRRIFERQGAYE

SEQ ID NO: 51 - protein, 326 aa, Artificial Sequence
  Synthetic
MSELNTARGAIDTTDLGVTLMHEHVFQMTTEIALNYPEAWGDEDKRVADAVSRLNELKARGVDTIVDLTVIGLGRYIPRIARVAAATELNIVVATGLYTYNDVPFRFHYEGPGGMLDGPEIMTEMFVRDIEQGIADTGVKAGILKCATDEPGITPGVERVLRAVAQAHKRTGVPISTHTHAGLRRGLEQQRIFEEEGVDLTRVVIGHSGDSTDIGYLEELIAAGSYLGMDRFGLDVISPFEERVKIVAQMCERGHADKMVLSHDANCYFDALPEELVPQMAPNWHYLHIHNDVIPALKERGVTDEQLKTMLVDNPRRIFERQGAYE

SEQ ID NO: 52 - protein, 326 aa, Artificial Sequence
  Synthetic
MSELNTARGAIDTTDLGVTLMHEHVFRMTTEIALNYPEAWGDEDKRVADAVSRLNELKARGVDTIVDLTVIGLGRYIPRIARVAAATELNIVVATGLYTYNDVPFRFHYEGPGGMLDGPEIMTEMFVRDIEQGIADTGVKAGILKCATDEPGITPGVERVLRAVAQAHKRTGVPISTHTHAGLRRGLEQQRIFEEEGVDLTRVVIGHSGDSTDIGYLEELIAAGSYLGMDRFGLDVISPFEERVKIVAQMCERGHADKMVLSHDANCYFDALPEELVPQMAPNWHYLHIHNDVIPALKERGVTDEQLKTMLVDNPRRIFERQGAYE

SEQ ID NO: 53 - protein, 326 aa, Artificial Sequence
  Synthetic
MSELNTARGAIDTTDLGVTLMHEHVFTMTTEIALNYPEAWGDEDKRVADAVSRLNELKARGVDTIVDLTVIGLGRYIPRIARVAAATELNIVVATGLYTYNDVPFRFHYEGPGGMLDGPEIMTEMFVRDIEQGIADTGVKAGILKCATDEPGITPGVERVLRAVAQAHKRTGVPISTHTHAGLRRGLEQQRIFEEEGVDLTRVVIGHSGDSTDIGYLEELIAAGSYLGMDRFGLDVISPFEERVKIVAQMCERGHADKMVLSHDANCYFDALPEELVPQMAPNWHYLHIHNDVIPALKERGVTDEQLKTMLVDNPRRIFERQGAYE

SEQ ID NO: 54 - protein, 326 aa, Artificial Sequence
  Synthetic
MSELNTARGAIDTTDLGVTLMHEHVFWMTTEIALNYPEAWGDEDKRVADAVSRLNELKARGVDTIVDLTVIGLGRYIPRIARVAAATELNIVVATGLYTYNDVPFRFHYEGPGGMLDGPEIMTEMFVRDIEQGIADTGVKAGILKCATDEPGITPGVERVLRAVAQAHKRTGVPISTHTHAGLRRGLEQQRIFEEEGVDLTRVVIGHSGDSTDIGYLEELIAAGSYLGMDRFGLDVISPFEERVKIVAQMCERGHADKMVLSHDANCYFDALPEELVPQMAPNWHYLHIHNDVIPALKERGVTDEQLKTMLVDNPRRIFERQGAYE

SEQ ID NO: 55 - protein, 326 aa, Artificial Sequence
  Synthetic
MSELNTARGAIDTTDLGVTLMHEHVFYMTTEIALNYPEAWGDEDKRVADAVSRLNELKARGVDTIVDLTVIGLGRYIPRIARVAAATELNIVVATGLYTYNDVPFRFHYEGPGGMLDGPEIMTEMFVRDIEQGIADTGVKAGILKCATDEPGITPGVERVLRAVAQAHKRTGVPISTHTHAGLRRGLEQQRIFEEEGVDLTRVVIGHSGDSTDIGYLEELIAAGSYLGMDRFGLDVISPFEERVKIVAQMCERGHADKMVLSHDANCYFDALPEELVPQMAPNWHYLHIHNDVIPALKERGVTDEQLKTMLVDNPRRIFERQGAYE

SEQ ID NO: 56 - protein, 326 aa, Artificial Sequence
  Synthetic
MSELNTARGAIDTTDLGVTLMHEHVFIMTTEIALNYPEAWGDEDKRVADAVSRLNELKARGVDTIIDLTVIGLGRYIPRIARVAAATELNIVVATGLYTYNDVPFRFHYEGPGGMLDGPEIMTEMFVRDIEQGIADTGVKAGILKCATDEPGITPGVERVLRAVAQAHKRTGVPISTHTHAGLRRGLEQQRIFEEEGVDLTRVVIGHSGDSTDIGYLEELIAAGSYLGMDRFGLDVISPFEERVKIVAQMCERGHADKMVLSHDANCYFDALPEELVPQMAPNWHYLHIHNDVIPALKERGVTDEQLKTMLVDNPRRIFERQGAYE

SEQ ID NO: 57 - protein, 326 aa, Artificial Sequence
  Synthetic
MSELNTARGAIDTTDLGVTLMHEHVFIMTTEIALNYPEAWGDEDKRVADAVSRLNELKARGVDTIVDATVIGLGRYIPRIARVAAATELNIVVATGLYTYNDVPFRFHYEGPGGMLDGPEIMTEMFVRDIEQGIADTGVKAGILKCATDEPGITPGVERVLRAVAQAHKRTGVPISTHTHAGLRRGLEQQRIFEEEGVDLTRVVIGHSGDSTDIGYLEELIAAGSYLGMDRFGLDVISPFEERVKIVAQMCERGHADKMVLSHDANCYFDALPEELVPQMAPNWHYLHIHNDVIPALKERGVTDEQLKTMLVDNPRRIFERQGAYE

SEQ ID NO: 58 - protein, 326 aa, Artificial Sequence
  Synthetic
MSELNTARGAIDTTDLGVTLMHEHVFIMTTEIALNYPEAWGDEDKRVADAVSRLNELKARGVDTIVDCTVIGLGRYIPRIARVAAATELNIVVATGLYTYNDVPFRFHYEGPGGMLDGPEIMTEMFVRDIEQGIADTGVKAGILKCATDEPGITPGVERVLRAVAQAHKRTGVPISTHTHAGLRRGLEQQRIFEEEGVDLTRVVIGHSGDSTDIGYLEELIAAGSYLGMDRFGLDVISPFEERVKIVAQMCERGHADKMVLSHDANCYFDALPEELVPQMAPNWHYLHIHNDVIPALKERGVTDEQLKTMLVDNPRRIFERQGAYE

SEQ ID NO: 59 - protein, 326 aa, Artificial Sequence
  Synthetic
MSELNTARGAIDTTDLGVTLMHEHVFIMTTEIALNYPEAWGDEDKRVADAVSRLNELKARGVDTIVDMTVIGLGRYIPRIARVAAATELNIVVATGLYTYNDVPFRFHYEGPGGMLDGPEIMTEMFVRDIEQGIADTGVKAGILKCATDEPGITPGVERVLRAVAQAHKRTGVPISTHTHAGLRRGLEQQRIFEEEGVDLTRVVIGHSGDSTDIGYLEELIAAGSYLGMDRFGLDVISPFEERVKIVAQMCERGHADKMVLSHDANCYFDALPEELVPQMAPNWHYLHIHNDVIPALKERGVTDEQLKTMLVDNPRRIFERQGAYE

SEQ ID NO: 60 - protein, 326 aa, Artificial Sequence
  Synthetic
MSELNTARGAIDTTDLGVTLMHEHVFIMTTEIALNYPEAWGDEDKRVADAVSRLNELKARGVDTIVDNTVIGLGRYIPRIARVAAATELNIVVATGLYTYNDVPFRFHYEGPGGMLDGPEIMTEMFVRDIEQGIADTGVKAGILKCATDEPGITPGVERVLRAVAQAHKRTGVPISTHTHAGLRRGLEQQRIFEEEGVDLTRVVIGHSGDSTDIGYLEELIAAGSYLGMDRFGLDVISPFEERVKIVAQMCERGHADKMVLSHDANCYFDALPEELVPQMAPNWHYLHIHNDVIPALKERGVTDEQLKTMLVDNPRRIFERQGAYE

SEQ ID NO: 61 - protein, 326 aa, Artificial Sequence
  Synthetic
MSELNTARGAIDTTDLGVTLMHEHVFIMTTEIALNYPEAWGDEDKRVADAVSRLNELKARGVDTIVDQTVIGLGRYIPRIARVAAATELNIVVATGLYTYNDVPFRFHYEGPGGMLDGPEIMTEMFVRDIEQGIADTGVKAGILKCATDEPGITPGVERVLRAVAQAHKRTGVPISTHTHAGLRRGLEQQRIFEEEGVDLTRVVIGHSGDSTDIGYLEELIAAGSYLGMDRFGLDVISPFEERVKIVAQMCERGHADKMVLSHDANCYFDALPEELVPQMAPNWHYLHIHNDVIPALKERGVTDEQLKTMLVDNPRRIFERQGAYE

SEQ ID NO: 62 - protein, 326 aa, Artificial Sequence
  Synthetic
MSELNTARGAIDTTDLGVTLMHEHVFIMTTEIALNYPEAWGDEDKRVADAVSRLNELKARGVDTIVDLQVIGLGRYIPRIARVAAATELNIVVATGLYTYNDVPFRFHYEGPGGMLDGPEIMTEMFVRDIEQGIADTGVKAGILKCATDEPGITPGVERVLRAVAQAHKRTGVPISTHTHAGLRRGLEQQRIFEEEGVDLTRVVIGHSGDSTDIGYLEELIAAGSYLGMDRFGLDVISPFEERVKIVAQMCERGHADKMVLSHDANCYFDALPEELVPQMAPNWHYLHIHNDVIPALKERGVTDEQLKTMLVDNPRRIFERQGAYE

SEQ ID NO: 63 - protein, 326 aa, Artificial Sequence
  Synthetic
MSELNTARGAIDTTDLGVTLMHEHVFIMTTEIALNYPEAWGDEDKRVADAVSRLNELKARGVDTIVDLSVIGLGRYIPRIARVAAATELNIVVATGLYTYNDVPFRFHYEGPGGMLDGPEIMTEMFVRDIEQGIADTGVKAGILKCATDEPGITPGVERVLRAVAQAHKRTGVPISTHTHAGLRRGLEQQRIFEEEGVDLTRVVIGHSGDSTDIGYLEELIAAGSYLGMDRFGLDVISPFEERVKIVAQMCERGHADKMVLSHDANCYFDALPEELVPQMAPNWHYLHIHNDVIPALKERGVTDEQLKTMLVDNPRRIFERQGAYE

SEQ ID NO: 64 - protein, 326 aa, Artificial Sequence
  Synthetic
MSELNTARGAIDTTDLGVTLMHEHVFIMTTEIALNYPEAWGDEDKRVADAVSRLNELKARGVDTIVDLTCIGLGRYIPRIARVAAATELNIVVATGLYTYNDVPFRFHYEGPGGMLDGPEIMTEMFVRDIEQGIADTGVKAGILKCATDEPGITPGVERVLRAVAQAHKRTGVPISTHTHAGLRRGLEQQRIFEEEGVDLTRVVIGHSGDSTDIGYLEELIAAGSYLGMDRFGLDVISPFEERVKIVAQMCERGHADKMVLSHDANCYFDALPEELVPQMAPNWHYLHIHNDVIPALKERGVTDEQLKTMLVDNPRRIFERQGAYE

SEQ ID NO: 65 - protein, 326 aa, Artificial Sequence
  Synthetic
MSELNTARGAIDTTDLGVTLMHEHVFIMTTEIALNYPEAWGDEDKRVADAVSRLNELKARGVDTIVDLTPIGLGRYIPRIARVAAATELNIVVATGLYTYNDVPFRFHYEGPGGMLDGPEIMTEMFVRDIEQGIADTGVKAGILKCATDEPGITPGVERVLRAVAQAHKRTGVPISTHTHAGLRRGLEQQRIFEEEGVDLTRVVIGHSGDSTDIGYLEELIAAGSYLGMDRFGLDVISPFEERVKIVAQMCERGHADKMVLSHDANCYFDALPEELVPQMAPNWHYLHIHNDVIPALKERGVTDEQLKTMLVDNPRRIFERQGAYE

SEQ ID NO: 66 - protein, 326 aa, Artificial Sequence
  Synthetic
MSELNTARGAIDTTDLGVTLMHEHVFIMTTEIALNYPEAWGDEDKRVADAVSRLNELKARGVDTIVDLTTIGLGRYIPRIARVAAATELNIVVATGLYTYNDVPFRFHYEGPGGMLDGPEIMTEMFVRDIEQGIADTGVKAGILKCATDEPGITPGVERVLRAVAQAHKRTGVPISTHTHAGLRRGLEQQRIFEEEGVDLTRVVIGHSGDSTDIGYLEELIAAGSYLGMDRFGLDVISPFEERVKIVAQMCERGHADKMVLSHDANCYFDALPEELVPQMAPNWHYLHIHNDVIPALKERGVTDEQLKTMLVDNPRRIFERQGAYE

SEQ ID NO: 67 - protein, 326 aa, Artificial Sequence
  Synthetic
MSELNTARGAIDTTDLGVTLMHEHVFIMTTEIALNYPEAWGDEDKRVADAVSRLNELKARGVDTIVDLTVIGCGRYIPRIARVAAATELNIVVATGLYTYNDVPFRFHYEGPGGMLDGPEIMTEMFVRDIEQGIADTGVKAGILKCATDEPGITPGVERVLRAVAQAHKRTGVPISTHTHAGLRRGLEQQRIFEEEGVDLTRVVIGHSGDSTDIGYLEELIAAGSYLGMDRFGLDVISPFEERVKIVAQMCERGHADKMVLSHDANCYFDALPEELVPQMAPNWHYLHIHNDVIPALKERGVTDEQLKTMLVDNPRRIFERQGAYE

SEQ ID NO: 68 - protein, 326 aa, Artificial Sequence
  Synthetic
MSELNTARGAIDTTDLGVTLMHEHVFIMTTEIALNYPEAWGDEDKRVADAVSRLNELKARGVDTIVDLTVIGHGRYIPRIARVAAATELNIVVATGLYTYNDVPFRFHYEGPGGMLDGPEIMTEMFVRDIEQGIADTGVKAGILKCATDEPGITPGVERVLRAVAQAHKRTGVPISTHTHAGLRRGLEQQRIFEEEGVDLTRVVIGHSGDSTDIGYLEELIAAGSYLGMDRFGLDVISPFEERVKIVAQMCERGHADKMVLSHDANCYFDALPEELVPQMAPNWHYLHIHNDVIPALKERGVTDEQLKTMLVDNPRRIFERQGAYE

SEQ ID NO: 69 - protein, 326 aa, Artificial Sequence
  Synthetic
MSELNTARGAIDTTDLGVTLMHEHVFIMTTEIALNYPEAWGDEDKRVADAVSRLNELKARGVDTIVDLTVIGMGRYIPRIARVAAATELNIVVATGLYTYNDVPFRFHYEGPGGMLDGPEIMTEMFVRDIEQGIADTGVKAGILKCATDEPGITPGVERVLRAVAQAHKRTGVPISTHTHAGLRRGLEQQRIFEEEGVDLTRVVIGHSGDSTDIGYLEELIAAGSYLGMDRFGLDVISPFEERVKIVAQMCERGHADKMVLSHDANCYFDALPEELVPQMAPNWHYLHIHNDVIPALKERGVTDEQLKTMLVDNPRRIFERQGAYE

SEQ ID NO: 70 - protein, 326 aa, Artificial Sequence
  Synthetic
MSELNTARGAIDTTDLGVTLMHEHVFIMTTEIALNYPEAWGDEDKRVADAVSRLNELKARGVDTIVDLTVIGLGRYIPRIARVAAATELNIVVATGLFTYNDVPFRFHYEGPGGMLDGPEIMTEMFVRDIEQGIADTGVKAGILKCATDEPGITPGVERVLRAVAQAHKRTGVPISTHTHAGLRRGLEQQRIFEEEGVDLTRVVIGHSGDSTDIGYLEELIAAGSYLGMDRFGLDVISPFEERVKIVAQMCERGHADKMVLSHDANCYFDALPEELVPQMAPNWHYLHIHNDVIPALKERGVTDEQLKTMLVDNPRRIFERQGAYE

SEQ ID NO: 71 - protein, 326 aa, Artificial Sequence
  Synthetic
MSELNTARGAIDTTDLGVTLMHEHVFIMTTEIALNYPEAWGDEDKRVADAVSRLNELKARGVDTIVDLTVIGLGRYIPRIARVAAATELNIVVATGLHTYNDVPFRFHYEGPGGMLDGPEIMTEMFVRDIEQGIADTGVKAGILKCATDEPGITPGVERVLRAVAQAHKRTGVPISTHTHAGLRRGLEQQRIFEEEGVDLTRVVIGHSGDSTDIGYLEELIAAGSYLGMDRFGLDVISPFEERVKIVAQMCERGHADKMVLSHDANCYFDALPEELVPQMAPNWHYLHIHNDVIPALKERGVTDEQLKTMLVDNPRRIFERQGAYE

SEQ ID NO: 72 - protein, 326 aa, Artificial Sequence
  Synthetic
MSELNTARGAIDTTDLGVTLMHEHVFIMTTEIALNYPEAWGDEDKRVADAVSRLNELKARGVDTIVDLTVIGLGRYIPRIARVAAATELNIVVATGLWTYNDVPFRFHYEGPGGMLDGPEIMTEMFVRDIEQGIADTGVKAGILKCATDEPGITPGVERVLRAVAQAHKRTGVPISTHTHAGLRRGLEQQRIFEEEGVDLTRVVIGHSGDSTDIGYLEELIAAGSYLGMDRFGLDVISPFEERVKIVAQMCERGHADKMVLSHDANCYFDALPEELVPQMAPNWHYLHIHNDVIPALKERGVTDEQLKTMLVDNPRRIFERQGAYE

SEQ ID NO: 73 - protein, 326 aa, Artificial Sequence
  Synthetic
MSELNTARGAIDTTDLGVTLMHEHVFIMTTEIALNYPEAWGDEDKRVADAVSRLNELKARGVDTIVDLTVIGLGRYIPRIARVAAATELNIVVATGLYTYNDVPFRFHYEGPGGMLDGPEIMTEMFVRDIEQGIADTGVKAGIIKCATDEPGITPGVERVLRAVAQAHKRTGVPISTHTHAGLRRGLEQQRIFEEEGVDLTRVVIGHSGDSTDIGYLEELIAAGSYLGMDRFGLDVISPFEERVKIVAQMCERGHADKMVLSHDANCYFDALPEELVPQMAPNWHYLHIHNDVIPALKERGVTDEQLKTMLVDNPRRIFERQGAYE

SEQ ID NO: 74 - protein, 326 aa, Artificial Sequence
  Synthetic
MSELNTARGAIDTTDLGVTLMHEHVFIMTTEIALNYPEAWGDEDKRVADAVSRLNELKARGVDTIVDLTVIGLGRYIPRIARVAAATELNIVVATGLYTYNDVPFRFHYEGPGGMLDGPEIMTEMFVRDIEQGIADTGVKAGILCCATDEPGITPGVERVLRAVAQAHKRTGVPISTHTHAGLRRGLEQQRIFEEEGVDLTRVVIGHSGDSTDIGYLEELIAAGSYLGMDRFGLDVISPFEERVKIVAQMCERGHADKMVLSHDANCYFDALPEELVPQMAPNWHYLHIHNDVIPALKERGVTDEQLKTMLVDNPRRIFERQGAYE

SEQ ID NO: 75 - protein, 326 aa, Artificial Sequence
  Synthetic
MSELNTARGAIDTTDLGVTLMHEHVFIMTTEIALNYPEAWGDEDKRVADAVSRLNELKARGVDTIVDLTVIGLGRYIPRIARVAAATELNIVVATGLYTYNDVPFRFHYEGPGGMLDGPEIMTEMFVRDIEQGIADTGVKAGILECATDEPGITPGVERVLRAVAQAHKRTGVPISTHTHAGLRRGLEQQRIFEEEGVDLTRVVIGHSGDSTDIGYLEELIAAGSYLGMDRFGLDVISPFEERVKIVAQMCERGHADKMVLSHDANCYFDALPEELVPQMAPNWHYLHIHNDVIPALKERGVTDEQLKTMLVDNPRRIFERQGAYE

SEQ ID NO: 76 - protein, 326 aa, Artificial Sequence
  Synthetic
MSELNTARGAIDTTDLGVTLMHEHVFIMTTEIALNYPEAWGDEDKRVADAVSRLNELKARGVDTIVDLTVIGLGRYIPRIARVAAATELNIVVATGLYTYNDVPFRFHYEGPGGMLDGPEIMTEMFVRDIEQGIADTGVKAGILRCATDEPGITPGVERVLRAVAQAHKRTGVPISTHTHAGLRRGLEQQRIFEEEGVDLTRVVIGHSGDSTDIGYLEELIAAGSYLGMDRFGLDVISPFEERVKIVAQMCERGHADKMVLSHDANCYFDALPEELVPQMAPNWHYLHIHNDVIPALKERGVTDEQLKTMLVDNPRRIFERQGAYE

SEQ ID NO: 77 - protein, 326 aa, Artificial Sequence
  Synthetic
MSELNTARGAIDTTDLGVTLMHEHVFIMTTEIALNYPEAWGDEDKRVADAVSRLNELKARGVDTIVDLTVIGLGRYIPRIARVAAATELNIVVATGLYTYNDVPFRFHYEGPGGMLDGPEIMTEMFVRDIEQGIADTGVKAGILSCATDEPGITPGVERVLRAVAQAHKRTGVPISTHTHAGLRRGLEQQRIFEEEGVDLTRVVIGHSGDSTDIGYLEELIAAGSYLGMDRFGLDVISPFEERVKIVAQMCERGHADKMVLSHDANCYFDALPEELVPQMAPNWHYLHIHNDVIPALKERGVTDEQLKTMLVDNPRRIFERQGAYE

SEQ ID NO: 78 - protein, 326 aa, Artificial Sequence
  Synthetic
MSELNTARGAIDTTDLGVTLMHEHVFIMTTEIALNYPEAWGDEDKRVADAVSRLNELKARGVDTIVDLTVIGLGRYIPRIARVAAATELNIVVATGLYTYNDVPFRFHYEGPGGMLDGPEIMTEMFVRDIEQGIADTGVKAGILKFATDEPGITPGVERVLRAVAQAHKRTGVPISTHTHAGLRRGLEQQRIFEEEGVDLTRVVIGHSGDSTDIGYLEELIAAGSYLGMDRFGLDVISPFEERVKIVAQMCERGHADKMVLSHDANCYFDALPEELVPQMAPNWHYLHIHNDVIPALKERGVTDEQLKTMLVDNPRRIFERQGAYE

SEQ ID NO: 79 - protein, 326 aa, Artificial Sequence
  Synthetic
MSELNTARGAIDTTDLGVTLMHEHVFIMTTEIALNYPEAWGDEDKRVADAVSRLNELKARGVDTIVDLTVIGLGRYIPRIARVAAATELNIVVATGLYTYNDVPFRFHYEGPGGMLDGPEIMTEMFVRDIEQGIADTGVKAGILKCFTDEPGITPGVERVLRAVAQAHKRTGVPISTHTHAGLRRGLEQQRIFEEEGVDLTRVVIGHSGDSTDIGYLEELIAAGSYLGMDRFGLDVISPFEERVKIVAQMCERGHADKMVLSHDANCYFDALPEELVPQMAPNWHYLHIHNDVIPALKERGVTDEQLKTMLVDNPRRIFERQGAYE

SEQ ID NO: 80 - protein, 326 aa, Artificial Sequence
  Synthetic
MSELNTARGAIDTTDLGVTLMHEHVFIMTTEIALNYPEAWGDEDKRVADAVSRLNELKARGVDTIVDLTVIGLGRYIPRIARVAAATELNIVVATGLYTYNDVPFRFHYEGPGGMLDGPEIMTEMFVRDIEQGIADTGVKAGILKCGTDEPGITPGVERVLRAVAQAHKRTGVPISTHTHAGLRRGLEQQRIFEEEGVDLTRVVIGHSGDSTDIGYLEELIAAGSYLGMDRFGLDVISPFEERVKIVAQMCERGHADKMVLSHDANCYFDALPEELVPQMAPNWHYLHIHNDVIPALKERGVTDEQLKTMLVDNPRRIFERQGAYE

SEQ ID NO: 81 - protein, 326 aa, Artificial Sequence
  Synthetic
MSELNTARGAIDTTDLGVTLMHEHVFIMTTEIALNYPEAWGDEDKRVADAVSRLNELKARGVDTIVDLTVIGLGRYIPRIARVAAATELNIVVATGLYTYNDVPFRFHYEGPGGMLDGPEIMTEMFVRDIEQGIADTGVKAGILKCACDEPGITPGVERVLRAVAQAHKRTGVPISTHTHAGLRRGLEQQRIFEEEGVDLTRVVIGHSGDSTDIGYLEELIAAGSYLGMDRFGLDVISPFEERVKIVAQMCERGHADKMVLSHDANCYFDALPEELVPQMAPNWHYLHIHNDVIPALKERGVTDEQLKTMLVDNPRRIFERQGAYE

SEQ ID NO: 82 - protein, 326 aa, Artificial Sequence
  Synthetic
MSELNTARGAIDTTDLGVTLMHEHVFIMTTEIALNYPEAWGDEDKRVADAVSRLNELKARGVDTIVDLTVIGLGRYIPRIARVAAATELNIVVATGLYTYNDVPFRFHYEGPGGMLDGPEIMTEMFVRDIEQGIADTGVKAGILKCAMDEPGITPGVERVLRAVAQAHKRTGVPISTHTHAGLRRGLEQQRIFEEEGVDLTRVVIGHSGDSTDIGYLEELIAAGSYLGMDRFGLDVISPFEERVKIVAQMCERGHADKMVLSHDANCYFDALPEELVPQMAPNWHYLHIHNDVIPALKERGVTDEQLKTMLVDNPRRIFERQGAYE

SEQ ID NO: 83 - protein, 326 aa, Artificial Sequence
  Synthetic
MSELNTARGAIDTTDLGVTLMHEHVFIMTTEIALNYPEAWGDEDKRVADAVSRLNELKARGVDTIVDLTVIGLGRYIPRIARVAAATELNIVVATGLYTYNDVPFRFHYEGPGGMLDGPEIMTEMFVRDIEQGIADTGVKAGILKCAVDEPGITPGVERVLRAVAQAHKRTGVPISTHTHAGLRRGLEQQRIFEEEGVDLTRVVIGHSGDSTDIGYLEELIAAGSYLGMDRFGLDVISPFEERVKIVAQMCERGHADKMVLSHDANCYFDALPEELVPQMAPNWHYLHIHNDVIPALKERGVTDEQLKTMLVDNPRRIFERQGAYE

SEQ ID NO: 84 - protein, 326 aa, Artificial Sequence
  Synthetic
MSELNTARGAIDTTDLGVTLMHEHVFIMTTEIALNYPEAWGDEDKRVADAVSRLNELKARGVDTIVDLTVIGLGRYIPRIARVAAATELNIVVATGLYTYNDVPFRFHYEGPGGMLDGPEIMTEMFVRDIEQGIADTGVKAGILKCATDEPGITPGVERVLRAIAQAHKRTGVPISTHTHAGLRRGLEQQRIFEEEGVDLTRVVIGHSGDSTDIGYLEELIAAGSYLGMDRFGLDVISPFEERVKIVAQMCERGHADKMVLSHDANCYFDALPEELVPQMAPNWHYLHIHNDVIPALKERGVTDEQLKTMLVDNPRRIFERQGAYE

SEQ ID NO: 85 - protein, 326 aa, Artificial Sequence
  Synthetic
MSELNTARGAIDTTDLGVTLMHEHVFIMTTEIALNYPEAWGDEDKRVADAVSRLNELKARGVDTIVDLTVIGLGRYIPRIARVAAATELNIVVATGLYTYNDVPFRFHYEGPGGMLDGPEIMTEMFVRDIEQGIADTGVKAGILKCATDEPGITPGVERVLRAVAQAHKRTGVPICTHTHAGLRRGLEQQRIFEEEGVDLTRVVIGHSGDSTDIGYLEELIAAGSYLGMDRFGLDVISPFEERVKIVAQMCERGHADKMVLSHDANCYFDALPEELVPQMAPNWHYLHIHNDVIPALKERGVTDEQLKTMLVDNPRRIFERQGAYE

SEQ ID NO: 86 - protein, 326 aa, Artificial Sequence
  Synthetic
MSELNTARGAIDTTDLGVTLMHEHVFIMTTEIALNYPEAWGDEDKRVADAVSRLNELKARGVDTIVDLTVIGLGRYIPRIARVAAATELNIVVATGLYTYNDVPFRFHYEGPGGMLDGPEIMTEMFVRDIEQGIADTGVKAGILKCATDEPGITPGVERVLRAVAQAHKRTGVPIFTHTHAGLRRGLEQQRIFEEEGVDLTRVVIGHSGDSTDIGYLEELIAAGSYLGMDRFGLDVISPFEERVKIVAQMCERGHADKMVLSHDANCYFDALPEELVPQMAPNWHYLHIHNDVIPALKERGVTDEQLKTMLVDNPRRIFERQGAYE

SEQ ID NO: 87 - protein, 326 aa, Artificial Sequence
  Synthetic
MSELNTARGAIDTTDLGVTLMHEHVFIMTTEIALNYPEAWGDEDKRVADAVSRLNELKARGVDTIVDLTVIGLGRYIPRIARVAAATELNIVVATGLYTYNDVPFRFHYEGPGGMLDGPEIMTEMFVRDIEQGIADTGVKAGILKCATDEPGITPGVERVLRAVAQAHKRTGVPIHTHTHAGLRRGLEQQRIFEEEGVDLTRVVIGHSGDSTDIGYLEELIAAGSYLGMDRFGLDVISPFEERVKIVAQMCERGHADKMVLSHDANCYFDALPEELVPQMAPNWHYLHIHNDVIPALKERGVTDEQLKTMLVDNPRRIFERQGAYE

SEQ ID NO: 88 - protein, 326 aa, Artificial Sequence
  Synthetic
MSELNTARGAIDTTDLGVTLMHEHVFIMTTEIALNYPEAWGDEDKRVADAVSRLNELKARGVDTIVDLTVIGLGRYIPRIARVAAATELNIVVATGLYTYNDVPFRFHYEGPGGMLDGPEIMTEMFVRDIEQGIADTGVKAGILKCATDEPGITPGVERVLRAVAQAHKRTGVPIITHTHAGLRRGLEQQRIFEEEGVDLTRVVIGHSGDSTDIGYLEELIAAGSYLGMDRFGLDVISPFEERVKIVAQMCERGHADKMVLSHDANCYFDALPEELVPQMAPNWHYLHIHNDVIPALKERGVTDEQLKTMLVDNPRRIFERQGAYE

SEQ ID NO: 89 - protein, 326 aa, Artificial Sequence
  Synthetic
MSELNTARGAIDTTDLGVTLMHEHVFIMTTEIALNYPEAWGDEDKRVADAVSRLNELKARGVDTIVDLTVIGLGRYIPRIARVAAATELNIVVATGLYTYNDVPFRFHYEGPGGMLDGPEIMTEMFVRDIEQGIADTGVKAGILKCATDEPGITPGVERVLRAVAQAHKRTGVPIMTHTHAGLRRGLEQQRIFEEEGVDLTRVVIGHSGDSTDIGYLEELIAAGSYLGMDRFGLDVISPFEERVKIVAQMCERGHADKMVLSHDANCYFDALPEELVPQMAPNWHYLHIHNDVIPALKERGVTDEQLKTMLVDNPRRIFERQGAYE

SEQ ID NO: 90 - protein, 326 aa, Artificial Sequence
  Synthetic
MSELNTARGAIDTTDLGVTLMHEHVFIMTTEIALNYPEAWGDEDKRVADAVSRLNELKARGVDTIVDLTVIGLGRYIPRIARVAAATELNIVVATGLYTYNDVPFRFHYEGPGGMLDGPEIMTEMFVRDIEQGIADTGVKAGILKCATDEPGITPGVERVLRAVAQAHKRTGVPITTHTHAGLRRGLEQQRIFEEEGVDLTRVVIGHSGDSTDIGYLEELIAAGSYLGMDRFGLDVISPFEERVKIVAQMCERGHADKMVLSHDANCYFDALPEELVPQMAPNWHYLHIHNDVIPALKERGVTDEQLKTMLVDNPRRIFERQGAYE

SEQ ID NO: 91 - protein, 326 aa, Artificial Sequence
  Synthetic
MSELNTARGAIDTTDLGVTLMHEHVFIMTTEIALNYPEAWGDEDKRVADAVSRLNELKARGVDTIVDLTVIGLGRYIPRIARVAAATELNIVVATGLYTYNDVPFRFHYEGPGGMLDGPEIMTEMFVRDIEQGIADTGVKAGILKCATDEPGITPGVERVLRAVAQAHKRTGVPIVTHTHAGLRRGLEQQRIFEEEGVDLTRVVIGHSGDSTDIGYLEELIAAGSYLGMDRFGLDVISPFEERVKIVAQMCERGHADKMVLSHDANCYFDALPEELVPQMAPNWHYLHIHNDVIPALKERGVTDEQLKTMLVDNPRRIFERQGAYE

SEQ ID NO: 92 - protein, 326 aa, Artificial Sequence
  Synthetic
MSELNTARGAIDTTDLGVTLMHEHVFIMTTEIALNYPEAWGDEDKRVADAVSRLNELKARGVDTIVDLTVIGLGRYIPRIARVAAATELNIVVATGLYTYNDVPFRFHYEGPGGMLDGPEIMTEMFVRDIEQGIADTGVKAGILKCATDEPGITPGVERVLRAVAQAHKRTGVPIWTHTHAGLRRGLEQQRIFEEEGVDLTRVVIGHSGDSTDIGYLEELIAAGSYLGMDRFGLDVISPFEERVKIVAQMCERGHADKMVLSHDANCYFDALPEELVPQMAPNWHYLHIHNDVIPALKERGVTDEQLKTMLVDNPRRIFERQGAYE

SEQ ID NO: 93 - protein, 326 aa, Artificial Sequence
  Synthetic
MSELNTARGAIDTTDLGVTLMHEHVFIMTTEIALNYPEAWGDEDKRVADAVSRLNELKARGVDTIVDLTVIGLGRYIPRIARVAAATELNIVVATGLYTYNDVPFRFHYEGPGGMLDGPEIMTEMFVRDIEQGIADTGVKAGILKCATDEPGITPGVERVLRAVAQAHKRTGVPIYTHTHAGLRRGLEQQRIFEEEGVDLTRVVIGHSGDSTDIGYLEELIAAGSYLGMDRFGLDVISPFEERVKIVAQMCERGHADKMVLSHDANCYFDALPEELVPQMAPNWHYLHIHNDVIPALKERGVTDEQLKTMLVDNPRRIFERQGAYE

SEQ ID NO: 94 - protein, 326 aa, Artificial Sequence
  Synthetic
MSELNTARGAIDTTDLGVTLMHEHVFIMTTEIALNYPEAWGDEDKRVADAVSRLNELKARGVDTIVDLTVIGLGRYIPRIARVAAATELNIVVATGLYTYNDVPFRFHYEGPGGMLDGPEIMTEMFVRDIEQGIADTGVKAGILKCATDEPGITPGVERVLRAVAQAHKRTGVPISCHTHAGLRRGLEQQRIFEEEGVDLTRVVIGHSGDSTDIGYLEELIAAGSYLGMDRFGLDVISPFEERVKIVAQMCERGHADKMVLSHDANCYFDALPEELVPQMAPNWHYLHIHNDVIPALKERGVTDEQLKTMLVDNPRRIFERQGAYE

SEQ ID NO: 95 - protein, 326 aa, Artificial Sequence
  Synthetic
MSELNTARGAIDTTDLGVTLMHEHVFIMTTEIALNYPEAWGDEDKRVADAVSRLNELKARGVDTIVDLTVIGLGRYIPRIARVAAATELNIVVATGLYTYNDVPFRFHYEGPGGMLDGPEIMTEMFVRDIEQGIADTGVKAGILKCATDEPGITPGVERVLRAVAQAHKRTGVPISLHTHAGLRRGLEQQRIFEEEGVDLTRVVIGHSGDSTDIGYLEELIAAGSYLGMDRFGLDVISPFEERVKIVAQMCERGHADKMVLSHDANCYFDALPEELVPQMAPNWHYLHIHNDVIPALKERGVTDEQLKTMLVDNPRRIFERQGAYE

SEQ ID NO: 96 - protein, 326 aa, Artificial Sequence
  Synthetic
MSELNTARGAIDTTDLGVTLMHEHVFIMTTEIALNYPEAWGDEDKRVADAVSRLNELKARGVDTIVDLTVIGLGRYIPRIARVAAATELNIVVATGLYTYNDVPFRFHYEGPGGMLDGPEIMTEMFVRDIEQGIADTGVKAGILKCATDEPGITPGVERVLRAVAQAHKRTGVPISVHTHAGLRRGLEQQRIFEEEGVDLTRVVIGHSGDSTDIGYLEELIAAGSYLGMDRFGLDVISPFEERVKIVAQMCERGHADKMVLSHDANCYFDALPEELVPQMAPNWHYLHIHNDVIPALKERGVTDEQLKTMLVDNPRRIFERQGAYE

SEQ ID NO: 97 - protein, 326 aa, Artificial Sequence
  Synthetic
MSELNTARGAIDTTDLGVTLMHEHVFIMTTEIALNYPEAWGDEDKRVADAVSRLNELKARGVDTIVDLTVIGLGRYIPRIARVAAATELNIVVATGLYTYNDVPFRFHYEGPGGMLDGPEIMTEMFVRDIEQGIADTGVKAGILKCATDEPGITPGVERVLRAVAQAHKRTGVPISTATHAGLRRGLEQQRIFEEEGVDLTRVVIGHSGDSTDIGYLEELIAAGSYLGMDRFGLDVISPFEERVKIVAQMCERGHADKMVLSHDANCYFDALPEELVPQMAPNWHYLHIHNDVIPALKERGVTDEQLKTMLVDNPRRIFERQGAYE

SEQ ID NO: 98 - protein, 326 aa, Artificial Sequence
  Synthetic
MSELNTARGAIDTTDLGVTLMHEHVFIMTTEIALNYPEAWGDEDKRVADAVSRLNELKARGVDTIVDLTVIGLGRYIPRIARVAAATELNIVVATGLYTYNDVPFRFHYEGPGGMLDGPEIMTEMFVRDIEQGIADTGVKAGILKCATDEPGITPGVERVLRAVAQAHKRTGVPISTSTHAGLRRGLEQQRIFEEEGVDLTRVVIGHSGDSTDIGYLEELIAAGSYLGMDRFGLDVISPFEERVKIVAQMCERGHADKMVLSHDANCYFDALPEELVPQMAPNWHYLHIHNDVIPALKERGVTDEQLKTMLVDNPRRIFERQGAYE

SEQ ID NO: 99 - protein, 326 aa, Artificial Sequence
  Synthetic
MSELNTARGAIDTTDLGVTLMHEHVFIMTTEIALNYPEAWGDEDKRVADAVSRLNELKARGVDTIVDLTVIGLGRYIPRIARVAAATELNIVVATGLYTYNDVPFRFHYEGPGGMLDGPEIMTEMFVRDIEQGIADTGVKAGILKCATDEPGITPGVERVLRAVAQAHKRTGVPISTTTHAGLRRGLEQQRIFEEEGVDLTRVVIGHSGDSTDIGYLEELIAAGSYLGMDRFGLDVISPFEERVKIVAQMCERGHADKMVLSHDANCYFDALPEELVPQMAPNWHYLHIHNDVIPALKERGVTDEQLKTMLVDNPRRIFERQGAYE

SEQ ID NO: 100 - protein, 326 aa, Artificial Sequence
  Synthetic
MSELNTARGAIDTTDLGVTLMHEHVFIMTTEIALNYPEAWGDEDKRVADAVSRLNELKARGVDTIVDLTVIGLGRYIPRIARVAAATELNIVVATGLYTYNDVPFRFHYEGPGGMLDGPEIMTEMFVRDIEQGIADTGVKAGILKCATDEPGITPGVERVLRAVAQAHKRTGVPISTHCHAGLRRGLEQQRIFEEEGVDLTRVVIGHSGDSTDIGYLEELIAAGSYLGMDRFGLDVISPFEERVKIVAQMCERGHADKMVLSHDANCYFDALPEELVPQMAPNWHYLHIHNDVIPALKERGVTDEQLKTMLVDNPRRIFERQGAYE

SEQ ID NO: 101 - protein, 326 aa, Artificial Sequence
  Synthetic
MSELNTARGAIDTTDLGVTLMHEHVFIMTTEIALNYPEAWGDEDKRVADAVSRLNELKARGVDTIVDLTVIGLGRYIPRIARVAAATELNIVVATGLYTYNDVPFRFHYEGPGGMLDGPEIMTEMFVRDIEQGIADTGVKAGILKCATDEPGITPGVERVLRAVAQAHKRTGVPISTHEHAGLRRGLEQQRIFEEEGVDLTRVVIGHSGDSTDIGYLEELIAAGSYLGMDRFGLDVISPFEERVKIVAQMCERGHADKMVLSHDANCYFDALPEELVPQMAPNWHYLHIHNDVIPALKERGVTDEQLKTMLVDNPRRIFERQGAYE

SEQ ID NO: 102 - protein, 326 aa, Artificial Sequence
  Synthetic
MSELNTARGAIDTTDLGVTLMHEHVFIMTTEIALNYPEAWGDEDKRVADAVSRLNELKARGVDTIVDLTVIGLGRYIPRIARVAAATELNIVVATGLYTYNDVPFRFHYEGPGGMLDGPEIMTEMFVRDIEQGIADTGVKAGILKCATDEPGITPGVERVLRAVAQAHKRTGVPISTHSHAGLRRGLEQQRIFEEEGVDLTRVVIGHSGDSTDIGYLEELIAAGSYLGMDRFGLDVISPFEERVKIVAQMCERGHADKMVLSHDANCYFDALPEELVPQMAPNWHYLHIHNDVIPALKERGVTDEQLKTMLVDNPRRIFERQGAYE

SEQ ID NO: 103 - protein, 326 aa, Artificial Sequence
  Synthetic
MSELNTARGAIDTTDLGVTLMHEHVFIMTTEIALNYPEAWGDEDKRVADAVSRLNELKARGVDTIVDLTVIGLGRYIPRIARVAAATELNIVVATGLYTYNDVPFRFHYEGPGGMLDGPEIMTEMFVRDIEQGIADTGVKAGILKCATDEPGITPGVERVLRAVAQAHKRTGVPISTHVHAGLRRGLEQQRIFEEEGVDLTRVVIGHSGDSTDIGYLEELIAAGSYLGMDRFGLDVISPFEERVKIVAQMCERGHADKMVLSHDANCYFDALPEELVPQMAPNWHYLHIHNDVIPALKERGVTDEQLKTMLVDNPRRIFERQGAYE

SEQ ID NO: 104 - protein, 326 aa, Artificial Sequence
  Synthetic
MSELNTARGAIDTTDLGVTLMHEHVFIMTTEIALNYPEAWGDEDKRVADAVSRLNELKARGVDTIVDLTVIGLGRYIPRIARVAAATELNIVVATGLYTYNDVPFRFHYEGPGGMLDGPEIMTEMFVRDIEQGIADTGVKAGILKCATDEPGITPGVERVLRAVAQAHKRTGVPISTHTHCGLRRGLEQQRIFEEEGVDLTRVVIGHSGDSTDIGYLEELIAAGSYLGMDRFGLDVISPFEERVKIVAQMCERGHADKMVLSHDANCYFDALPEELVPQMAPNWHYLHIHNDVIPALKERGVTDEQLKTMLVDNPRRIFERQGAYE

SEQ ID NO: 105 - protein, 326 aa, Artificial Sequence
  Synthetic
MSELNTARGAIDTTDLGVTLMHEHVFIMTTEIALNYPEAWGDEDKRVADAVSRLNELKARGVDTIVDLTVIGLGRYIPRIARVAAATELNIVVATGLYTYNDVPFRFHYEGPGGMLDGPEIMTEMFVRDIEQGIADTGVKAGILKCATDEPGITPGVERVLRAVAQAHKRTGVPISTHTHHGLRRGLEQQRIFEEEGVDLTRVVIGHSGDSTDIGYLEELIAAGSYLGMDRFGLDVISPFEERVKIVAQMCERGHADKMVLSHDANCYFDALPEELVPQMAPNWHYLHIHNDVIPALKERGVTDEQLKTMLVDNPRRIFERQGAYE

SEQ ID NO: 106 - protein, 326 aa, Artificial Sequence
  Synthetic
MSELNTARGAIDTTDLGVTLMHEHVFIMTTEIALNYPEAWGDEDKRVADAVSRLNELKARGVDTIVDLTVIGLGRYIPRIARVAAATELNIVVATGLYTYNDVPFRFHYEGPGGMLDGPEIMTEMFVRDIEQGIADTGVKAGILKCATDEPGITPGVERVLRAVAQAHKRTGVPISTHTHPGLRRGLEQQRIFEEEGVDLTRVVIGHSGDSTDIGYLEELIAAGSYLGMDRFGLDVISPFEERVKIVAQMCERGHADKMVLSHDANCYFDALPEELVPQMAPNWHYLHIHNDVIPALKERGVTDEQLKTMLVDNPRRIFERQGAYE

SEQ ID NO: 107 - protein, 326 aa, Artificial Sequence
  Synthetic
MSELNTARGAIDTTDLGVTLMHEHVFIMTTEIALNYPEAWGDEDKRVADAVSRLNELKARGVDTIVDLTVIGLGRYIPRIARVAAATELNIVVATGLYTYNDVPFRFHYEGPGGMLDGPEIMTEMFVRDIEQGIADTGVKAGILKCATDEPGITPGVERVLRAVAQAHKRTGVPISTHTHSGLRRGLEQQRIFEEEGVDLTRVVIGHSGDSTDIGYLEELIAAGSYLGMDRFGLDVISPFEERVKIVAQMCERGHADKMVLSHDANCYFDALPEELVPQMAPNWHYLHIHNDVIPALKERGVTDEQLKTMLVDNPRRIFERQGAYE

SEQ ID NO: 108 - protein, 326 aa, Artificial Sequence
  Synthetic
MSELNTARGAIDTTDLGVTLMHEHVFIMTTEIALNYPEAWGDEDKRVADAVSRLNELKARGVDTIVDLTVIGLGRYIPRIARVAAATELNIVVATGLYTYNDVPFRFHYEGPGGMLDGPEIMTEMFVRDIEQGIADTGVKAGILKCATDEPGITPGVERVLRAVAQAHKRTGVPISTHTHAGLRRGLEQQRIFEEEGVDLTRVVIAHSGDSTDIGYLEELIAAGSYLGMDRFGLDVISPFEERVKIVAQMCERGHADKMVLSHDANCYFDALPEELVPQMAPNWHYLHIHNDVIPALKERGVTDEQLKTMLVDNPRRIFERQGAYE

SEQ ID NO: 109 - protein, 326 aa, Artificial Sequence
  Synthetic
MSELNTARGAIDTTDLGVTLMHEHVFIMTTEIALNYPEAWGDEDKRVADAVSRLNELKARGVDTIVDLTVIGLGRYIPRIARVAAATELNIVVATGLYTYNDVPFRFHYEGPGGMLDGPEIMTEMFVRDIEQGIADTGVKAGILKCATDEPGITPGVERVLRAVAQAHKRTGVPISTHTHAGLRRGLEQQRIFEEEGVDLTRVVIMHSGDSTDIGYLEELIAAGSYLGMDRFGLDVISPFEERVKIVAQMCERGHADKMVLSHDANCYFDALPEELVPQMAPNWHYLHIHNDVIPALKERGVTDEQLKTMLVDNPRRIFERQGAYE

SEQ ID NO: 110 - protein, 326 aa, Artificial Sequence
  Synthetic
MSELNTARGAIDTTDLGVTLMHEHVFIMTTEIALNYPEAWGDEDKRVADAVSRLNELKARGVDTIVDLTVIGLGRYIPRIARVAAATELNIVVATGLYTYNDVPFRFHYEGPGGMLDGPEIMTEMFVRDIEQGIADTGVKAGILKCATDEPGITPGVERVLRAVAQAHKRTGVPISTHTHAGLRRGLEQQRIFEEEGVDLTRVVISHSGDSTDIGYLEELIAAGSYLGMDRFGLDVISPFEERVKIVAQMCERGHADKMVLSHDANCYFDALPEELVPQMAPNWHYLHIHNDVIPALKERGVTDEQLKTMLVDNPRRIFERQGAYE

SEQ ID NO: 111 - protein, 326 aa, Artificial Sequence
  Synthetic
MSELNTARGAIDTTDLGVTLMHEHVFIMTTEIALNYPEAWGDEDKRVADAVSRLNELKARGVDTIVDLTVIGLGRYIPRIARVAAATELNIVVATGLYTYNDVPFRFHYEGPGGMLDGPEIMTEMFVRDIEQGIADTGVKAGILKCATDEPGITPGVERVLRAVAQAHKRTGVPISTHTHAGLRRGLEQQRIFEEEGVDLTRVVIGHAGDSTDIGYLEELIAAGSYLGMDRFGLDVISPFEERVKIVAQMCERGHADKMVLSHDANCYFDALPEELVPQMAPNWHYLHIHNDVIPALKERGVTDEQLKTMLVDNPRRIFERQGAYE

SEQ ID NO: 112 - protein, 326 aa, Artificial Sequence
  Synthetic
MSELNTARGAIDTTDLGVTLMHEHVFIMTTEIALNYPEAWGDEDKRVADAVSRLNELKARGVDTIVDLTVIGLGRYIPRIARVAAATELNIVVATGLYTYNDVPFRFHYEGPGGMLDGPEIMTEMFVRDIEQGIADTGVKAGILKCATDEPGITPGVERVLRAVAQAHKRTGVPISTHTHAGLRRGLEQQRIFEEEGVDLTRVVIGHCGDSTDIGYLEELIAAGSYLGMDRFGLDVISPFEERVKIVAQMCERGHADKMVLSHDANCYFDALPEELVPQMAPNWHYLHIHNDVIPALKERGVTDEQLKTMLVDNPRRIFERQGAYE

SEQ ID NO: 113 - protein, 326 aa, Artificial Sequence
  Synthetic
MSELNTARGAIDTTDLGVTLMHEHVFIMTTEIALNYPEAWGDEDKRVADAVSRLNELKARGVDTIVDLTVIGLGRYIPRIARVAAATELNIVVATGLYTYNDVPFRFHYEGPGGMLDGPEIMTEMFVRDIEQGIADTGVKAGILKCATDEPGITPGVERVLRAVAQAHKRTGVPISTHTHAGLRRGLEQQRIFEEEGVDLTRVVIGHQGDSTDIGYLEELIAAGSYLGMDRFGLDVISPFEERVKIVAQMCERGHADKMVLSHDANCYFDALPEELVPQMAPNWHYLHIHNDVIPALKERGVTDEQLKTMLVDNPRRIFERQGAYE

SEQ ID NO: 114 - protein, 326 aa, Artificial Sequence
  Synthetic
MSELNTARGAIDTTDLGVTLMHEHVFIMTTEIALNYPEAWGDEDKRVADAVSRLNELKARGVDTIVDLTVIGLGRYIPRIARVAAATELNIVVATGLYTYNDVPFRFHYEGPGGMLDGPEIMTEMFVRDIEQGIADTGVKAGILKCATDEPGITPGVERVLRAVAQAHKRTGVPISTHTHAGLRRGLEQQRIFEEEGVDLTRVVIGHTGDSTDIGYLEELIAAGSYLGMDRFGLDVISPFEERVKIVAQMCERGHADKMVLSHDANCYFDALPEELVPQMAPNWHYLHIHNDVIPALKERGVTDEQLKTMLVDNPRRIFERQGAYE

SEQ ID NO: 115 - protein, 326 aa, Artificial Sequence
  Synthetic
MSELNTARGAIDTTDLGVTLMHEHVFIMTTEIALNYPEAWGDEDKRVADAVSRLNELKARGVDTIVDLTVIGLGRYIPRIARVAAATELNIVVATGLYTYNDVPFRFHYEGPGGMLDGPEIMTEMFVRDIEQGIADTGVKAGILKCATDEPGITPGVERVLRAVAQAHKRTGVPISTHTHAGLRRGLEQQRIFEEEGVDLTRVVIGHSNDSTDIGYLEELIAAGSYLGMDRFGLDVISPFEERVKIVAQMCERGHADKMVLSHDANCYFDALPEELVPQMAPNWHYLHIHNDVIPALKERGVTDEQLKTMLVDNPRRIFERQGAYE

SEQ ID NO: 116 - protein, 326 aa, Artificial Sequence
  Synthetic
MSELNTARGAIDTTDLGVTLMHEHVFIMTTEIALNYPEAWGDEDKRVADAVSRLNELKARGVDTIVDLTVIGLGRYIPRIARVAAATELNIVVATGLYTYNDVPFRFHYEGPGGMLDGPEIMTEMFVRDIEQGIADTGVKAGILKCATDEPGITPGVERVLRAVAQAHKRTGVPISTHTHAGLRRGLEQQRIFEEEGVDLTRVVIGHSGESTDIGYLEELIAAGSYLGMDRFGLDVISPFEERVKIVAQMCERGHADKMVLSHDANCYFDALPEELVPQMAPNWHYLHIHNDVIPALKERGVTDEQLKTMLVDNPRRIFERQGAYE

SEQ ID NO: 117 - protein, 326 aa, Artificial Sequence
  Synthetic
MSELNTARGAIDTTDLGVTLMHEHVFIMTTEIALNYPEAWGDEDKRVADAVSRLNELKARGVDTIVDLTVIGLGRYIPRIARVAAATELNIVVATGLYTYNDVPFRFHYEGPGGMLDGPEIMTEMFVRDIEQGIADTGVKAGILKCATDEPGITPGVERVLRAVAQAHKRTGVPISTHTHAGLRRGLEQQRIFEEEGVDLTRVVIGHSGSSTDIGYLEELIAAGSYLGMDRFGLDVISPFEERVKIVAQMCERGHADKMVLSHDANCYFDALPEELVPQMAPNWHYLHIHNDVIPALKERGVTDEQLKTMLVDNPRRIFERQGAYE

SEQ ID NO: 118 - protein, 326 aa, Artificial Sequence
  Synthetic
MSELNTARGAIDTTDLGVTLMHEHVFIMTTEIALNYPEAWGDEDKRVADAVSRLNELKARGVDTIVDLTVIGLGRYIPRIARVAAATELNIVVATGLYTYNDVPFRFHYEGPGGMLDGPEIMTEMFVRDIEQGIADTGVKAGILKCATDEPGITPGVERVLRAVAQAHKRTGVPISTHTHAGLRRGLEQQRIFEEEGVDLTRVVIGHSGTSTDIGYLEELIAAGSYLGMDRFGLDVISPFEERVKIVAQMCERGHADKMVLSHDANCYFDALPEELVPQMAPNWHYLHIHNDVIPALKERGVTDEQLKTMLVDNPRRIFERQGAYE

SEQ ID NO: 119 - protein, 326 aa, Artificial Sequence
  Synthetic
MSELNTARGAIDTTDLGVTLMHEHVFIMTTEIALNYPEAWGDEDKRVADAVSRLNELKARGVDTIVDLTVIGLGRYIPRIARVAAATELNIVVATGLYTYNDVPFRFHYEGPGGMLDGPEIMTEMFVRDIEQGIADTGVKAGILKCATDEPGITPGVERVLRAVAQAHKRTGVPISTHTHAGLRRGLEQQRIFEEEGVDLTRVVIGHSGDSTDIGYLEELIAAGSYLAMDRFGLDVISPFEERVKIVAQMCERGHADKMVLSHDANCYFDALPEELVPQMAPNWHYLHIHNDVIPALKERGVTDEQLKTMLVDNPRRIFERQGAYE

SEQ ID NO: 120 - protein, 326 aa, Artificial Sequence
  Synthetic
MSELNTARGAIDTTDLGVTLMHEHVFIMTTEIALNYPEAWGDEDKRVADAVSRLNELKARGVDTIVDLTVIGLGRYIPRIARVAAATELNIVVATGLYTYNDVPFRFHYEGPGGMLDGPEIMTEMFVRDIEQGIADTGVKAGILKCATDEPGITPGVERVLRAVAQAHKRTGVPISTHTHAGLRRGLEQQRIFEEEGVDLTRVVIGHSGDSTDIGYLEELIAAGSYLEMDRFGLDVISPFEERVKIVAQMCERGHADKMVLSHDANCYFDALPEELVPQMAPNWHYLHIHNDVIPALKERGVTDEQLKTMLVDNPRRIFERQGAYE

SEQ ID NO: 121 - protein, 326 aa, Artificial Sequence
  Synthetic
MSELNTARGAIDTTDLGVTLMHEHVFIMTTEIALNYPEAWGDEDKRVADAVSRLNELKARGVDTIVDLTVIGLGRYIPRIARVAAATELNIVVATGLYTYNDVPFRFHYEGPGGMLDGPEIMTEMFVRDIEQGIADTGVKAGILKCATDEPGITPGVERVLRAVAQAHKRTGVPISTHTHAGLRRGLEQQRIFEEEGVDLTRVVIGHSGDSTDIGYLEELIAAGSYLHMDRFGLDVISPFEERVKIVAQMCERGHADKMVLSHDANCYFDALPEELVPQMAPNWHYLHIHNDVIPALKERGVTDEQLKTMLVDNPRRIFERQGAYE

SEQ ID NO: 122 - protein, 326 aa, Artificial Sequence
  Synthetic
MSELNTARGAIDTTDLGVTLMHEHVFIMTTEIALNYPEAWGDEDKRVADAVSRLNELKARGVDTIVDLTVIGLGRYIPRIARVAAATELNIVVATGLYTYNDVPFRFHYEGPGGMLDGPEIMTEMFVRDIEQGIADTGVKAGILKCATDEPGITPGVERVLRAVAQAHKRTGVPISTHTHAGLRRGLEQQRIFEEEGVDLTRVVIGHSGDSTDIGYLEELIAAGSYLSMDRFGLDVISPFEERVKIVAQMCERGHADKMVLSHDANCYFDALPEELVPQMAPNWHYLHIHNDVIPALKERGVTDEQLKTMLVDNPRRIFERQGAYE

SEQ ID NO: 123 - protein, 326 aa, Artificial Sequence
  Synthetic
MSELNTARGAIDTTDLGVTLMHEHVFIMTTEIALNYPEAWGDEDKRVADAVSRLNELKARGVDTIVDLTVIGLGRYIPRIARVAAATELNIVVATGLYTYNDVPFRFHYEGPGGMLDGPEIMTEMFVRDIEQGIADTGVKAGILKCATDEPGITPGVERVLRAVAQAHKRTGVPISTHTHAGLRRGLEQQRIFEEEGVDLTRVVIGHSGDSTDIGYLEELIAAGSYLGMPRFGLDVISPFEERVKIVAQMCERGHADKMVLSHDANCYFDALPEELVPQMAPNWHYLHIHNDVIPALKERGVTDEQLKTMLVDNPRRIFERQGAYE

SEQ ID NO: 124 - protein, 326 aa, Artificial Sequence
  Synthetic
MSELNTARGAIDTTDLGVTLMHEHVFIMTTEIALNYPEAWGDEDKRVADAVSRLNELKARGVDTIVDLTVIGLGRYIPRIARVAAATELNIVVATGLYTYNDVPFRFHYEGPGGMLDGPEIMTEMFVRDIEQGIADTGVKAGILKCATDEPGITPGVERVLRAVAQAHKRTGVPISTHTHAGLRRGLEQQRIFEEEGVDLTRVVIGHSGDSTDIGYLEELIAAGSYLGMDGFGLDVISPFEERVKIVAQMCERGHADKMVLSHDANCYFDALPEELVPQMAPNWHYLHIHNDVIPALKERGVTDEQLKTMLVDNPRRIFERQGAYE

SEQ ID NO: 125 - protein, 326 aa, Artificial Sequence
  Synthetic
MSELNTARGAIDTTDLGVTLMHEHVFIMTTEIALNYPEAWGDEDKRVADAVSRLNELKARGVDTIVDLTVIGLGRYIPRIARVAAATELNIVVATGLYTYNDVPFRFHYEGPGGMLDGPEIMTEMFVRDIEQGIADTGVKAGILKCATDEPGITPGVERVLRAVAQAHKRTGVPISTHTHAGLRRGLEQQRIFEEEGVDLTRVVIGHSGDSTDIGYLEELIAAGSYLGMDHFGLDVISPFEERVKIVAQMCERGHADKMVLSHDANCYFDALPEELVPQMAPNWHYLHIHNDVIPALKERGVTDEQLKTMLVDNPRRIFERQGAYE

SEQ ID NO: 126 - protein, 326 aa, Artificial Sequence
  Synthetic
MSELNTARGAIDTTDLGVTLMHEHVFIMTTEIALNYPEAWGDEDKRVADAVSRLNELKARGVDTIVDLTVIGLGRYIPRIARVAAATELNIVVATGLYTYNDVPFRFHYEGPGGMLDGPEIMTEMFVRDIEQGIADTGVKAGILKCATDEPGITPGVERVLRAVAQAHKRTGVPISTHTHAGLRRGLEQQRIFEEEGVDLTRVVIGHSGDSTDIGYLEELIAAGSYLGMDLFGLDVISPFEERVKIVAQMCERGHADKMVLSHDANCYFDALPEELVPQMAPNWHYLHIHNDVIPALKERGVTDEQLKTMLVDNPRRIFERQGAYE

SEQ ID NO: 127 - protein, 326 aa, Artificial Sequence
  Synthetic
MSELNTARGAIDTTDLGVTLMHEHVFIMTTEIALNYPEAWGDEDKRVADAVSRLNELKARGVDTIVDLTVIGLGRYIPRIARVAAATELNIVVATGLYTYNDVPFRFHYEGPGGMLDGPEIMTEMFVRDIEQGIADTGVKAGILKCATDEPGITPGVERVLRAVAQAHKRTGVPISTHTHAGLRRGLEQQRIFEEEGVDLTRVVIGHSGDSTDIGYLEELIAAGSYLGMDMFGLDVISPFEERVKIVAQMCERGHADKMVLSHDANCYFDALPEELVPQMAPNWHYLHIHNDVIPALKERGVTDEQLKTMLVDNPRRIFERQGAYE

SEQ ID NO: 128 - protein, 326 aa, Artificial Sequence
  Synthetic
MSELNTARGAIDTTDLGVTLMHEHVFIMTTEIALNYPEAWGDEDKRVADAVSRLNELKARGVDTIVDLTVIGLGRYIPRIARVAAATELNIVVATGLYTYNDVPFRFHYEGPGGMLDGPEIMTEMFVRDIEQGIADTGVKAGILKCATDEPGITPGVERVLRAVAQAHKRTGVPISTHTHAGLRRGLEQQRIFEEEGVDLTRVVIGHSGDSTDIGYLEELIAAGSYLGMDQFGLDVISPFEERVKIVAQMCERGHADKMVLSHDANCYFDALPEELVPQMAPNWHYLHIHNDVIPALKERGVTDEQLKTMLVDNPRRIFERQGAYE

SEQ ID NO: 129 - protein, 326 aa, Artificial Sequence
  Synthetic
MSELNTARGAIDTTDLGVTLMHEHVFIMTTEIALNYPEAWGDEDKRVADAVSRLNELKARGVDTIVDLTVIGLGRYIPRIARVAAATELNIVVATGLYTYNDVPFRFHYEGPGGMLDGPEIMTEMFVRDIEQGIADTGVKAGILKCATDEPGITPGVERVLRAVAQAHKRTGVPISTHTHAGLRRGLEQQRIFEEEGVDLTRVVIGHSGDSTDIGYLEELIAAGSYLGMDTFGLDVISPFEERVKIVAQMCERGHADKMVLSHDANCYFDALPEELVPQMAPNWHYLHIHNDVIPALKERGVTDEQLKTMLVDNPRRIFERQGAYE

SEQ ID NO: 130 - protein, 326 aa, Artificial Sequence
  Synthetic
MSELNTARGAIDTTDLGVTLMHEHVFIMTTEIALNYPEAWGDEDKRVADAVSRLNELKARGVDTIVDLTVIGLGRYIPRIARVAAATELNIVVATGLYTYNDVPFRFHYEGPGGMLDGPEIMTEMFVRDIEQGIADTGVKAGILKCATDEPGITPGVERVLRAVAQAHKRTGVPISTHTHAGLRRGLEQQRIFEEEGVDLTRVVIGHSGDSTDIGYLEELIAAGSYLGMDWFGLDVISPFEERVKIVAQMCERGHADKMVLSHDANCYFDALPEELVPQMAPNWHYLHIHNDVIPALKERGVTDEQLKTMLVDNPRRIFERQGAYE

SEQ ID NO: 131 - protein, 326 aa, Artificial Sequence
  Synthetic
MSELNTARGAIDTTDLGVTLMHEHVFIMTTEIALNYPEAWGDEDKRVADAVSRLNELKARGVDTIVDLTVIGLGRYIPRIARVAAATELNIVVATGLYTYNDVPFRFHYEGPGGMLDGPEIMTEMFVRDIEQGIADTGVKAGILKCATDEPGITPGVERVLRAVAQAHKRTGVPISTHTHAGLRRGLEQQRIFEEEGVDLTRVVIGHSGDSTDIGYLEELIAAGSYLGMDRFGLDVISPFEERVKIVAQMCERGHADKMVLCHDANCYFDALPEELVPQMAPNWHYLHIHNDVIPALKERGVTDEQLKTMLVDNPRRIFERQGAYE

SEQ ID NO: 132 - protein, 326 aa, Artificial Sequence
  Synthetic
MSELNTARGAIDTTDLGVTLMHEHVFIMTTEIALNYPEAWGDEDKRVADAVSRLNELKARGVDTIVDLTVIGLGRYIPRIARVAAATELNIVVATGLYTYNDVPFRFHYEGPGGMLDGPEIMTEMFVRDIEQGIADTGVKAGILKCATDEPGITPGVERVLRAVAQAHKRTGVPISTHTHAGLRRGLEQQRIFEEEGVDLTRVVIGHSGDSTDIGYLEELIAAGSYLGMDRFGLDVISPFEERVKIVAQMCERGHADKMVLSCDANCYFDALPEELVPQMAPNWHYLHIHNDVIPALKERGVTDEQLKTMLVDNPRRIFERQGAYE

SEQ ID NO: 133 - protein, 326 aa, Artificial Sequence
  Synthetic
MSELNTARGAIDTTDLGVTLMHEHVFIMTTEIALNYPEAWGDEDKRVADAVSRLNELKARGVDTIVDLTVIGLGRYIPRIARVAAATELNIVVATGLYTYNDVPFRFHYEGPGGMLDGPEIMTEMFVRDIEQGIADTGVKAGILKCATDEPGITPGVERVLRAVAQAHKRTGVPISTHTHAGLRRGLEQQRIFEEEGVDLTRVVIGHSGDSTDIGYLEELIAAGSYLGMDRFGLDVISPFEERVKIVAQMCERGHADKMVLSFDANCYFDALPEELVPQMAPNWHYLHIHNDVIPALKERGVTDEQLKTMLVDNPRRIFERQGAYE

SEQ ID NO: 134 - protein, 326 aa, Artificial Sequence
  Synthetic
MSELNTARGAIDTTDLGVTLMHEHVFIMTTEIALNYPEAWGDEDKRVADAVSRLNELKARGVDTIVDLTVIGLGRYIPRIARVAAATELNIVVATGLYTYNDVPFRFHYEGPGGMLDGPEIMTEMFVRDIEQGIADTGVKAGILKCATDEPGITPGVERVLRAVAQAHKRTGVPISTHTHAGLRRGLEQQRIFEEEGVDLTRVVIGHSGDSTDIGYLEELIAAGSYLGMDRFGLDVISPFEERVKIVAQMCERGHADKMVLSMDANCYFDALPEELVPQMAPNWHYLHIHNDVIPALKERGVTDEQLKTMLVDNPRRIFERQGAYE

SEQ ID NO: 135 - protein, 326 aa, Artificial Sequence
  Synthetic
MSELNTARGAIDTTDLGVTLMHEHVFIMTTEIALNYPEAWGDEDKRVADAVSRLNELKARGVDTIVDLTVIGLGRYIPRIARVAAATELNIVVATGLYTYNDVPFRFHYEGPGGMLDGPEIMTEMFVRDIEQGIADTGVKAGILKCATDEPGITPGVERVLRAVAQAHKRTGVPISTHTHAGLRRGLEQQRIFEEEGVDLTRVVIGHSGDSTDIGYLEELIAAGSYLGMDRFGLDVISPFEERVKIVAQMCERGHADKMVLSNDANCYFDALPEELVPQMAPNWHYLHIHNDVIPALKERGVTDEQLKTMLVDNPRRIFERQGAYE

SEQ ID NO: 136 - protein, 326 aa, Artificial Sequence
  Synthetic
MSELNTARGAIDTTDLGVTLMHEHVFIMTTEIALNYPEAWGDEDKRVADAVSRLNELKARGVDTIVDLTVIGLGRYIPRIARVAAATELNIVVATGLYTYNDVPFRFHYEGPGGMLDGPEIMTEMFVRDIEQGIADTGVKAGILKCATDEPGITPGVERVLRAVAQAHKRTGVPISTHTHAGLRRGLEQQRIFEEEGVDLTRVVIGHSGDSTDIGYLEELIAAGSYLGMDRFGLDVISPFEERVKIVAQMCERGHADKMVLSSDANCYFDALPEELVPQMAPNWHYLHIHNDVIPALKERGVTDEQLKTMLVDNPRRIFERQGAYE

SEQ ID NO: 137 - protein, 326 aa, Artificial Sequence
  Synthetic
MSELNTARGAIDTTDLGVTLMHEHVFIMTTEIALNYPEAWGDEDKRVADAVSRLNELKARGVDTIVDLTVIGLGRYIPRIARVAAATELNIVVATGLYTYNDVPFRFHYEGPGGMLDGPEIMTEMFVRDIEQGIADTGVKAGILKCATDEPGITPGVERVLRAVAQAHKRTGVPISTHTHAGLRRGLEQQRIFEEEGVDLTRVVIGHSGDSTDIGYLEELIAAGSYLGMDRFGLDVISPFEERVKIVAQMCERGHADKMVLSTDANCYFDALPEELVPQMAPNWHYLHIHNDVIPALKERGVTDEQLKTMLVDNPRRIFERQGAYE

SEQ ID NO: 138 - protein, 326 aa, Artificial Sequence
  Synthetic
MSELNTARGAIDTTDLGVTLMHEHVFIMTTEIALNYPEAWGDEDKRVADAVSRLNELKARGVDTIVDLTVIGLGRYIPRIARVAAATELNIVVATGLYTYNDVPFRFHYEGPGGMLDGPEIMTEMFVRDIEQGIADTGVKAGILKCATDEPGITPGVERVLRAVAQAHKRTGVPISTHTHAGLRRGLEQQRIFEEEGVDLTRVVIGHSGDSTDIGYLEELIAAGSYLGMDRFGLDVISPFEERVKIVAQMCERGHADKMVLSHNANCYFDALPEELVPQMAPNWHYLHIHNDVIPALKERGVTDEQLKTMLVDNPRRIFERQGAYE

SEQ ID NO: 139 - protein, 326 aa, Artificial Sequence
  Synthetic
MSELNTARGAIDTTDLGVTLMHEHVFIMTTEIALNYPEAWGDEDKRVADAVSRLNELKARGVDTIVDLTVIGLGRYIPRIARVAAATELNIVVATGLYTYNDVPFRFHYEGPGGMLDGPEIMTEMFVRDIEQGIADTGVKAGILKCATDEPGITPGVERVLRAVAQAHKRTGVPISTHTHAGLRRGLEQQRIFEEEGVDLTRVVIGHSGDSTDIGYLEELIAAGSYLGMDRFGLDVISPFEERVKIVAQMCERGHADKMVLSHPANCYFDALPEELVPQMAPNWHYLHIHNDVIPALKERGVTDEQLKTMLVDNPRRIFERQGAYE

SEQ ID NO: 140 - protein, 326 aa, Artificial Sequence
  Synthetic
MSELNTARGAIDTTDLGVTLMHEHVFIMTTEIALNYPEAWGDEDKRVADAVSRLNELKARGVDTIVDLTVIGLGRYIPRIARVAAATELNIVVATGLYTYNDVPFRFHYEGPGGMLDGPEIMTEMFVRDIEQGIADTGVKAGILKCATDEPGITPGVERVLRAVAQAHKRTGVPISTHTHAGLRRGLEQQRIFEEEGVDLTRVVIGHSGDSTDIGYLEELIAAGSYLGMDRFGLDVISPFEERVKIVAQMCERGHADKMVLSHSANCYFDALPEELVPQMAPNWHYLHIHNDVIPALKERGVTDEQLKTMLVDNPRRIFERQGAYE

SEQ ID NO: 141 - protein, 326 aa, Artificial Sequence
  Synthetic
MSELNTARGAIDTTDLGVTLMHEHVFIMTTEIALNYPEAWGDEDKRVADAVSRLNELKARGVDTIVDLTVIGLGRYIPRIARVAAATELNIVVATGLYTYNDVPFRFHYEGPGGMLDGPEIMTEMFVRDIEQGIADTGVKAGILKCATDEPGITPGVERVLRAVAQAHKRTGVPISTHTHAGLRRGLEQQRIFEEEGVDLTRVVIGHSGDSTDIGYLEELIAAGSYLGMDRFGLDVISPFEERVKIVAQMCERGHADKMVLSHDCNCYFDALPEELVPQMAPNWHYLHIHNDVIPALKERGVTDEQLKTMLVDNPRRIFERQGAYE

SEQ ID NO: 142 - protein, 326 aa, Artificial Sequence
  Synthetic
MSELNTARGAIDTTDLGVTLMHEHVFIMTTEIALNYPEAWGDEDKRVADAVSRLNELKARGVDTIVDLTVIGLGRYIPRIARVAAATELNIVVATGLYTYNDVPFRFHYEGPGGMLDGPEIMTEMFVRDIEQGIADTGVKAGILKCATDEPGITPGVERVLRAVAQAHKRTGVPISTHTHAGLRRGLEQQRIFEEEGVDLTRVVIGHSGDSTDIGYLEELIAAGSYLGMDRFGLDVISPFEERVKIVAQMCERGHADKMVLSHDFNCYFDALPEELVPQMAPNWHYLHIHNDVIPALKERGVTDEQLKTMLVDNPRRIFERQGAYE

SEQ ID NO: 143 - protein, 326 aa, Artificial Sequence
  Synthetic
MSELNTARGAIDTTDLGVTLMHEHVFIMTTEIALNYPEAWGDEDKRVADAVSRLNELKARGVDTIVDLTVIGLGRYIPRIARVAAATELNIVVATGLYTYNDVPFRFHYEGPGGMLDGPEIMTEMFVRDIEQGIADTGVKAGILKCATDEPGITPGVERVLRAVAQAHKRTGVPISTHTHAGLRRGLEQQRIFEEEGVDLTRVVIGHSGDSTDIGYLEELIAAGSYLGMDRFGLDVISPFEERVKIVAQMCERGHADKMVLSHDLNCYFDALPEELVPQMAPNWHYLHIHNDVIPALKERGVTDEQLKTMLVDNPRRIFERQGAYE

SEQ ID NO: 144 - protein, 326 aa, Artificial Sequence
  Synthetic
MSELNTARGAIDTTDLGVTLMHEHVFIMTTEIALNYPEAWGDEDKRVADAVSRLNELKARGVDTIVDLTVIGLGRYIPRIARVAAATELNIVVATGLYTYNDVPFRFHYEGPGGMLDGPEIMTEMFVRDIEQGIADTGVKAGILKCATDEPGITPGVERVLRAVAQAHKRTGVPISTHTHAGLRRGLEQQRIFEEEGVDLTRVVIGHSGDSTDIGYLEELIAAGSYLGMDRFGLDVISPFEERVKIVAQMCERGHADKMVLSHDMNCYFDALPEELVPQMAPNWHYLHIHNDVIPALKERGVTDEQLKTMLVDNPRRIFERQGAYE

SEQ ID NO: 145 - protein, 326 aa, Artificial Sequence
  Synthetic
MSELNTARGAIDTTDLGVTLMHEHVFIMTTEIALNYPEAWGDEDKRVADAVSRLNELKARGVDTIVDLTVIGLGRYIPRIARVAAATELNIVVATGLYTYNDVPFRFHYEGPGGMLDGPEIMTEMFVRDIEQGIADTGVKAGILKCATDEPGITPGVERVLRAVAQAHKRTGVPISTHTHAGLRRGLEQQRIFEEEGVDLTRVVIGHSGDSTDIGYLEELIAAGSYLGMDRFGLDVISPFEERVKIVAQMCERGHADKMVLSHDTNCYFDALPEELVPQMAPNWHYLHIHNDVIPALKERGVTDEQLKTMLVDNPRRIFERQGAYE

SEQ ID NO: 146 - protein, 326 aa, Artificial Sequence
  Synthetic
MSELNTARGAIDTTDLGVTLMHEHVFIMTTEIALNYPEAWGDEDKRVADAVSRLNELKARGVDTIVDLTVIGLGRYIPRIARVAAATELNIVVATGLYTYNDVPFRFHYEGPGGMLDGPEIMTEMFVRDIEQGIADTGVKAGILKCATDEPGITPGVERVLRAVAQAHKRTGVPISTHTHAGLRRGLEQQRIFEEEGVDLTRVVIGHSGDSTDIGYLEELIAAGSYLGMDRFGLDVISPFEERVKIVAQMCERGHADKMVLSHDWNCYFDALPEELVPQMAPNWHYLHIHNDVIPALKERGVTDEQLKTMLVDNPRRIFERQGAYE

SEQ ID NO: 147 - protein, 326 aa, Artificial Sequence
  Synthetic
MSELNTARGAIDTTDLGVTLMHEHVFIMTTEIALNYPEAWGDEDKRVADAVSRLNELKARGVDTIVDLTVIGLGRYIPRIARVAAATELNIVVATGLYTYNDVPFRFHYEGPGGMLDGPEIMTEMFVRDIEQGIADTGVKAGILKCATDEPGITPGVERVLRAVAQAHKRTGVPISTHTHAGLRRGLEQQRIFEEEGVDLTRVVIGHSGDSTDIGYLEELIAAGSYLGMDRFGLDVISPFEERVKIVAQMCERGHADKMVLSHDYNCYFDALPEELVPQMAPNWHYLHIHNDVIPALKERGVTDEQLKTMLVDNPRRIFERQGAYE

SEQ ID NO: 148 - protein, 326 aa, Artificial Sequence
  Synthetic
MSELNTARGAIDTTDLGVTLMHEHVFIMTTEIALNYPEAWGDEDKRVADAVSRLNELKARGVDTIVDLTVIGLGRYIPRIARVAAATELNIVVATGLYTYNDVPFRFHYEGPGGMLDGPEIMTEMFVRDIEQGIADTGVKAGILKCATDEPGITPGVERVLRAVAQAHKRTGVPISTHTHAGLRRGLEQQRIFEEEGVDLTRVVIGHSGDSTDIGYLEELIAAGSYLGMDRFGLDVISPFEERVKIVAQMCERGHADKMVLSHDAACYFDALPEELVPQMAPNWHYLHIHNDVIPALKERGVTDEQLKTMLVDNPRRIFERQGAYE

SEQ ID NO: 149 - protein, 326 aa, Artificial Sequence
  Synthetic
MSELNTARGAIDTTDLGVTLMHEHVFIMTTEIALNYPEAWGDEDKRVADAVSRLNELKARGVDTIVDLTVIGLGRYIPRIARVAAATELNIVVATGLYTYNDVPFRFHYEGPGGMLDGPEIMTEMFVRDIEQGIADTGVKAGILKCATDEPGITPGVERVLRAVAQAHKRTGVPISTHTHAGLRRGLEQQRIFEEEGVDLTRVVIGHSGDSTDIGYLEELIAAGSYLGMDRFGLDVISPFEERVKIVAQMCERGHADKMVLSHDAGCYFDALPEELVPQMAPNWHYLHIHNDVIPALKERGVTDEQLKTMLVDNPRRIFERQGAYE

SEQ ID NO: 150 - protein, 326 aa, Artificial Sequence
  Synthetic
MSELNTARGAIDTTDLGVTLMHEHVFIMTTEIALNYPEAWGDEDKRVADAVSRLNELKARGVDTIVDLTVIGLGRYIPRIARVAAATELNIVVATGLYTYNDVPFRFHYEGPGGMLDGPEIMTEMFVRDIEQGIADTGVKAGILKCATDEPGITPGVERVLRAVAQAHKRTGVPISTHTHAGLRRGLEQQRIFEEEGVDLTRVVIGHSGDSTDIGYLEELIAAGSYLGMDRFGLDVISPFEERVKIVAQMCERGHADKMVLSHDAMCYFDALPEELVPQMAPNWHYLHIHNDVIPALKERGVTDEQLKTMLVDNPRRIFERQGAYE

SEQ ID NO: 151 - protein, 326 aa, Artificial Sequence
  Synthetic
MSELNTARGAIDTTDLGVTLMHEHVFIMTTEIALNYPEAWGDEDKRVADAVSRLNELKARGVDTIVDLTVIGLGRYIPRIARVAAATELNIVVATGLYTYNDVPFRFHYEGPGGMLDGPEIMTEMFVRDIEQGIADTGVKAGILKCATDEPGITPGVERVLRAVAQAHKRTGVPISTHTHAGLRRGLEQQRIFEEEGVDLTRVVIGHSGDSTDIGYLEELIAAGSYLGMDRFGLDVISPFEERVKIVAQMCERGHADKMVLSHDASCYFDALPEELVPQMAPNWHYLHIHNDVIPALKERGVTDEQLKTMLVDNPRRIFERQGAYE

SEQ ID NO: 152 - protein, 326 aa, Artificial Sequence
  Synthetic
MSELNTARGAIDTTDLGVTLMHEHVFIMTTEIALNYPEAWGDEDKRVADAVSRLNELKARGVDTIVDLTVIGLGRYIPRIARVAAATELNIVVATGLYTYNDVPFRFHYEGPGGMLDGPEIMTEMFVRDIEQGIADTGVKAGILKCATDEPGITPGVERVLRAVAQAHKRTGVPISTHTHAGLRRGLEQQRIFEEEGVDLTRVVIGHSGDSTDIGYLEELIAAGSYLGMDRFGLDVISPFEERVKIVAQMCERGHADKMVLSHDATCYFDALPEELVPQMAPNWHYLHIHNDVIPALKERGVTDEQLKTMLVDNPRRIFERQGAYE

SEQ ID NO: 153 - protein, 326 aa, Artificial Sequence
  Synthetic
MSELNTARGAIDTTDLGVTLMHEHVFIMTTEIALNYPEAWGDEDKRVADAVSRLNELKARGVDTIVDLTVIGLGRYIPRIARVAAATELNIVVATGLYTYNDVPFRFHYEGPGGMLDGPEIMTEMFVRDIEQGIADTGVKAGILKCATDEPGITPGVERVLRAVAQAHKRTGVPISTHTHAGLRRGLEQQRIFEEEGVDLTRVVIGHSGDSTDIGYLEELIAAGSYLGMDRFGLDVISPFEERVKIVAQMCERGHADKMVLSHDAWCYFDALPEELVPQMAPNWHYLHIHNDVIPALKERGVTDEQLKTMLVDNPRRIFERQGAYE

SEQ ID NO: 154 - protein, 326 aa, Artificial Sequence
  Synthetic
MSELNTARGAIDTTDLGVTLMHEHVFIMTTEIALNYPEAWGDEDKRVADAVSRLNELKARGVDTIVDLTVIGLGRYIPRIARVAAATELNIVVATGLYTYNDVPFRFHYEGPGGMLDGPEIMTEMFVRDIEQGIADTGVKAGILKCATDEPGITPGVERVLRAVAQAHKRTGVPISTHTHAGLRRGLEQQRIFEEEGVDLTRVVIGHSGDSTDIGYLEELIAAGSYLGMDRFGLDVISPFEERVKIVAQMCERGHADKMVLSHDANAYFDALPEELVPQMAPNWHYLHIHNDVIPALKERGVTDEQLKTMLVDNPRRIFERQGAYE

SEQ ID NO: 155 - protein, 326 aa, Artificial Sequence
  Synthetic
MSELNTARGAIDTTDLGVTLMHEHVFIMTTEIALNYPEAWGDEDKRVADAVSRLNELKARGVDTIVDLTVIGLGRYIPRIARVAAATELNIVVATGLYTYNDVPFRFHYEGPGGMLDGPEIMTEMFVRDIEQGIADTGVKAGILKCATDEPGITPGVERVLRAVAQAHKRTGVPISTHTHAGLRRGLEQQRIFEEEGVDLTRVVIGHSGDSTDIGYLEELIAAGSYLGMDRFGLDVISPFEERVKIVAQMCERGHADKMVLSHDANTYFDALPEELVPQMAPNWHYLHIHNDVIPALKERGVTDEQLKTMLVDNPRRIFERQGAYE

SEQ ID NO: 156 - protein, 326 aa, Artificial Sequence
  Synthetic
MSELNTARGAIDTTDLGVTLMHEHVFIMTTEIALNYPEAWGDEDKRVADAVSRLNELKARGVDTIVDLTVIGLGRYIPRIARVAAATELNIVVATGLYTYNDVPFRFHYEGPGGMLDGPEIMTEMFVRDIEQGIADTGVKAGILKCATDEPGITPGVERVLRAVAQAHKRTGVPISTHTHAGLRRGLEQQRIFEEEGVDLTRVVIGHSGDSTDIGYLEELIAAGSYLGMDRFGLDVISPFEERVKIVAQMCERGHADKMVLSHDANWYFDALPEELVPQMAPNWHYLHIHNDVIPALKERGVTDEQLKTMLVDNPRRIFERQGAYE

SEQ ID NO: 157 - protein, 326 aa, Artificial Sequence
  Synthetic
MSELNTARGAIDTTDLGVTLMHEHVFIMTTEIALNYPEAWGDEDKRVADAVSRLNELKARGVDTIVDLTVIGLGRYIPRIARVAAATELNIVVATGLYTYNDVPFRFHYEGPGGMLDGPEIMTEMFVRDIEQGIADTGVKAGILKCATDEPGITPGVERVLRAVAQAHKRTGVPISTHTHAGLRRGLEQQRIFEEEGVDLTRVVIGHSGDSTDIGYLEELIAAGSYLGMDRFGLDVISPFEERVKIVAQMCERGHADKMVLSHDANCYFDALPEELVPQMAPNCHYLHIHNDVIPALKERGVTDEQLKTMLVDNPRRIFERQGAYE

SEQ ID NO: 158 - protein, 326 aa, Artificial Sequence
  Synthetic
MSELNTARGAIDTTDLGVTLMHEHVFIMTTEIALNYPEAWGDEDKRVADAVSRLNELKARGVDTIVDLTVIGLGRYIPRIARVAAATELNIVVATGLYTYNDVPFRFHYEGPGGMLDGPEIMTEMFVRDIEQGIADTGVKAGILKCATDEPGITPGVERVLRAVAQAHKRTGVPISTHTHAGLRRGLEQQRIFEEEGVDLTRVVIGHSGDSTDIGYLEELIAAGSYLGMDRFGLDVISPFEERVKIVAQMCERGHADKMVLSHDANCYFDALPEELVPQMAPNDHYLHIHNDVIPALKERGVTDEQLKTMLVDNPRRIFERQGAYE

SEQ ID NO: 159 - protein, 326 aa, Artificial Sequence
  Synthetic
MSELNTARGAIDTTDLGVTLMHEHVFIMTTEIALNYPEAWGDEDKRVADAVSRLNELKARGVDTIVDLTVIGLGRYIPRIARVAAATELNIVVATGLYTYNDVPFRFHYEGPGGMLDGPEIMTEMFVRDIEQGIADTGVKAGILKCATDEPGITPGVERVLRAVAQAHKRTGVPISTHTHAGLRRGLEQQRIFEEEGVDLTRVVIGHSGDSTDIGYLEELIAAGSYLGMDRFGLDVISPFEERVKIVAQMCERGHADKMVLSHDANCYFDALPEELVPQMAPNFHYLHIHNDVIPALKERGVTDEQLKTMLVDNPRRIFERQGAYE

SEQ ID NO: 160 - protein, 326 aa, Artificial Sequence
  Synthetic
MSELNTARGAIDTTDLGVTLMHEHVFIMTTEIALNYPEAWGDEDKRVADAVSRLNELKARGVDTIVDLTVIGLGRYIPRIARVAAATELNIVVATGLYTYNDVPFRFHYEGPGGMLDGPEIMTEMFVRDIEQGIADTGVKAGILKCATDEPGITPGVERVLRAVAQAHKRTGVPISTHTHAGLRRGLEQQRIFEEEGVDLTRVVIGHSGDSTDIGYLEELIAAGSYLGMDRFGLDVISPFEERVKIVAQMCERGHADKMVLSHDANCYFDALPEELVPQMAPNHHYLHIHNDVIPALKERGVTDEQLKTMLVDNPRRIFERQGAYE

SEQ ID NO: 161 - protein, 326 aa, Artificial Sequence
  Synthetic
MSELNTARGAIDTTDLGVTLMHEHVFIMTTEIALNYPEAWGDEDKRVADAVSRLNELKARGVDTIVDLTVIGLGRYIPRIARVAAATELNIVVATGLYTYNDVPFRFHYEGPGGMLDGPEIMTEMFVRDIEQGIADTGVKAGILKCATDEPGITPGVERVLRAVAQAHKRTGVPISTHTHAGLRRGLEQQRIFEEEGVDLTRVVIGHSGDSTDIGYLEELIAAGSYLGMDRFGLDVISPFEERVKIVAQMCERGHADKMVLSHDANCYFDALPEELVPQMAPNIHYLHIHNDVIPALKERGVTDEQLKTMLVDNPRRIFERQGAYE

SEQ ID NO: 162 - protein, 326 aa, Artificial Sequence
  Synthetic
MSELNTARGAIDTTDLGVTLMHEHVFIMTTEIALNYPEAWGDEDKRVADAVSRLNELKARGVDTIVDLTVIGLGRYIPRIARVAAATELNIVVATGLYTYNDVPFRFHYEGPGGMLDGPEIMTEMFVRDIEQGIADTGVKAGILKCATDEPGITPGVERVLRAVAQAHKRTGVPISTHTHAGLRRGLEQQRIFEEEGVDLTRVVIGHSGDSTDIGYLEELIAAGSYLGMDRFGLDVISPFEERVKIVAQMCERGHADKMVLSHDANCYFDALPEELVPQMAPNKHYLHIHNDVIPALKERGVTDEQLKTMLVDNPRRIFERQGAYE

SEQ ID NO: 163 - protein, 326 aa, Artificial Sequence
  Synthetic
MSELNTARGAIDTTDLGVTLMHEHVFIMTTEIALNYPEAWGDEDKRVADAVSRLNELKARGVDTIVDLTVIGLGRYIPRIARVAAATELNIVVATGLYTYNDVPFRFHYEGPGGMLDGPEIMTEMFVRDIEQGIADTGVKAGILKCATDEPGITPGVERVLRAVAQAHKRTGVPISTHTHAGLRRGLEQQRIFEEEGVDLTRVVIGHSGDSTDIGYLEELIAAGSYLGMDRFGLDVISPFEERVKIVAQMCERGHADKMVLSHDANCYFDALPEELVPQMAPNNHYLHIHNDVIPALKERGVTDEQLKTMLVDNPRRIFERQGAYE

SEQ ID NO: 164 - protein, 326 aa, Artificial Sequence
  Synthetic
MSELNTARGAIDTTDLGVTLMHEHVFIMTTEIALNYPEAWGDEDKRVADAVSRLNELKARGVDTIVDLTVIGLGRYIPRIARVAAATELNIVVATGLYTYNDVPFRFHYEGPGGMLDGPEIMTEMFVRDIEQGIADTGVKAGILKCATDEPGITPGVERVLRAVAQAHKRTGVPISTHTHAGLRRGLEQQRIFEEEGVDLTRVVIGHSGDSTDIGYLEELIAAGSYLGMDRFGLDVISPFEERVKIVAQMCERGHADKMVLSHDANCYFDALPEELVPQMAPNPHYLHIHNDVIPALKERGVTDEQLKTMLVDNPRRIFERQGAYE

SEQ ID NO: 165 - protein, 326 aa, Artificial Sequence
  Synthetic
MSELNTARGAIDTTDLGVTLMHEHVFIMTTEIALNYPEAWGDEDKRVADAVSRLNELKARGVDTIVDLTVIGLGRYIPRIARVAAATELNIVVATGLYTYNDVPFRFHYEGPGGMLDGPEIMTEMFVRDIEQGIADTGVKAGILKCATDEPGITPGVERVLRAVAQAHKRTGVPISTHTHAGLRRGLEQQRIFEEEGVDLTRVVIGHSGDSTDIGYLEELIAAGSYLGMDRFGLDVISPFEERVKIVAQMCERGHADKMVLSHDANCYFDALPEELVPQMAPNQHYLHIHNDVIPALKERGVTDEQLKTMLVDNPRRIFERQGAYE

SEQ ID NO: 166 - protein, 326 aa, Artificial Sequence
  Synthetic
MSELNTARGAIDTTDLGVTLMHEHVFIMTTEIALNYPEAWGDEDKRVADAVSRLNELKARGVDTIVDLTVIGLGRYIPRIARVAAATELNIVVATGLYTYNDVPFRFHYEGPGGMLDGPEIMTEMFVRDIEQGIADTGVKAGILKCATDEPGITPGVERVLRAVAQAHKRTGVPISTHTHAGLRRGLEQQRIFEEEGVDLTRVVIGHSGDSTDIGYLEELIAAGSYLGMDRFGLDVISPFEERVKIVAQMCERGHADKMVLSHDANCYFDALPEELVPQMAPNRHYLHIHNDVIPALKERGVTDEQLKTMLVDNPRRIFERQGAYE

SEQ ID NO: 167 - protein, 326 aa, Artificial Sequence
  Synthetic
MSELNTARGAIDTTDLGVTLMHEHVFIMTTEIALNYPEAWGDEDKRVADAVSRLNELKARGVDTIVDLTVIGLGRYIPRIARVAAATELNIVVATGLYTYNDVPFRFHYEGPGGMLDGPEIMTEMFVRDIEQGIADTGVKAGILKCATDEPGITPGVERVLRAVAQAHKRTGVPISTHTHAGLRRGLEQQRIFEEEGVDLTRVVIGHSGDSTDIGYLEELIAAGSYLGMDRFGLDVISPFEERVKIVAQMCERGHADKMVLSHDANCYFDALPEELVPQMAPNYHYLHIHNDVIPALKERGVTDEQLKTMLVDNPRRIFERQGAYE

SEQ ID NO: 168 - protein, 326 aa, Artificial Sequence
  Synthetic
MSELNTARGAIDTTDLGVTLMHEHVFIMTTEIALNYPEAWGDEDKRVADAVSRLNELKARGVDTIVDLTVIGLGRYIPRIARVAAATELNIVVATGLYTYNDVPFRFHYEGPGGMLDGPEIMTEMFVRDIEQGIADTGVKAGILKCATDEPGITPGVERVLRAVAQAHKRTGVPISTHTHAGLRRGLEQQRIFEEEGVDLTRVVIGHSGDSTDIGYLEELIAAGSYLGMDRFGLDVISPFEERVKIVAQMCERGHADKMVLSHDANCYFDALPEELVPQMAPNWHMLHIHNDVIPALKERGVTDEQLKTMLVDNPRRIFERQGAYE

SEQ ID NO: 169 - protein, 326 aa, Artificial Sequence
  Synthetic
MSELNTARGAIDTTDLGVTLMHEHVFIMTTEIALNYPEAWGDEDKRVADAVSRLNELKARGVDTIVDLTVIGLGRYIPRIARVAAATELNIVVATGLYTYNDVPFRFHYEGPGGMLDGPEIMTEMFVRDIEQGIADTGVKAGILKCATDEPGITPGVERVLRAVAQAHKRTGVPISTHTHAGLRRGLEQQRIFEEEGVDLTRVVIGHSGDSTDIGYLEELIAAGSYLGMDRFGLDVISPFEERVKIVAQMCERGHADKMVLSHDANCYFDALPEELVPQMAPNWHWLHIHNDVIPALKERGVTDEQLKTMLVDNPRRIFERQGAYE

SEQ ID NO: 170 - protein, 326 aa, Artificial Sequence
  Synthetic
MAELNTARGSIDTAALGVTLMHEHVFIMTTEIAENYPEAWGDEDRRVADAVKRLNELKARGVDTIVDLTVIGLGRYIPRIARVAAETELNIVVATGLYTYNDVPMYFHYLGPGGELGGPEIMTDMFVRDIEQGIADTGIKAGILKCATDTPGVTPGVERVLRAVAQAHKRTGVPISTHTHAGLRRGLEQQKIFEEEGVDLSRVIIGHSGDSTDIGYLEELIAAGSYLGMDRFGIDAFLPFEDRVNTVAQMCERGHADKMVLSHDANCYFDALPDELVSQVMPNWHYLHIHNDVIPALKERGVTDEQLHTMLVDNPRRIFERQGAYE

SEQ ID NO: 171 - protein, 326 aa, Artificial Sequence
  Synthetic
MKELNTARGSIDTAALGVTLMHEHVFIMTTEIAENYPEAWGDEDRRVADAVKRLNELKARGVDTIVDLTVIGLGRYIPRIARVAAETELNIVVATGLYTYNDVPMYFHYLGPGGELGGPEIMTDMFVRDIEQGIADTGIKAGILKCATDTPGVTPGVERVLRAVAQAHKRTGVPISTHTHAGLRRGLEQQKIFEEEGVDLSRVIIGHSGDSTDIGYLEELIAAGSYLGMDRFGIDAFLPFEDRVNTVAQMCERGHADKMVLSHDANCYFDALPDELVSQVMPNWHYLHIHNDVIPALKERGVTDEQLHTMLVDNPRRIFERQGAYE

SEQ ID NO: 172 - protein, 326 aa, Artificial Sequence
  Synthetic
MTELNTARGSIDTAALGVTLMHEHVFIMTTEIAENYPEAWGDEDRRVADAVKRLNELKARGVDTIVDLTVIGLGRYIPRIARVAAETELNIVVATGLYTYNDVPMYFHYLGPGGELGGPEIMTDMFVRDIEQGIADTGIKAGILKCATDTPGVTPGVERVLRAVAQAHKRTGVPISTHTHAGLRRGLEQQKIFEEEGVDLSRVIIGHSGDSTDIGYLEELIAAGSYLGMDRFGIDAFLPFEDRVNTVAQMCERGHADKMVLSHDANCYFDALPDELVSQVMPNWHYLHIHNDVIPALKERGVTDEQLHTMLVDNPRRIFERQGAYE

SEQ ID NO: 173 - protein, 326 aa, Artificial Sequence
  Synthetic
MSKLNTARGSIDTAALGVTLMHEHVFIMTTEIAENYPEAWGDEDRRVADAVKRLNELKARGVDTIVDLTVIGLGRYIPRIARVAAETELNIVVATGLYTYNDVPMYFHYLGPGGELGGPEIMTDMFVRDIEQGIADTGIKAGILKCATDTPGVTPGVERVLRAVAQAHKRTGVPISTHTHAGLRRGLEQQKIFEEEGVDLSRVIIGHSGDSTDIGYLEELIAAGSYLGMDRFGIDAFLPFEDRVNTVAQMCERGHADKMVLSHDANCYFDALPDELVSQVMPNWHYLHIHNDVIPALKERGVTDEQLHTMLVDNPRRIFERQGAYE

SEQ ID NO: 174 - protein, 326 aa, Artificial Sequence
  Synthetic
MSQLNTARGSIDTAALGVTLMHEHVFIMTTEIAENYPEAWGDEDRRVADAVKRLNELKARGVDTIVDLTVIGLGRYIPRIARVAAETELNIVVATGLYTYNDVPMYFHYLGPGGELGGPEIMTDMFVRDIEQGIADTGIKAGILKCATDTPGVTPGVERVLRAVAQAHKRTGVPISTHTHAGLRRGLEQQKIFEEEGVDLSRVIIGHSGDSTDIGYLEELIAAGSYLGMDRFGIDAFLPFEDRVNTVAQMCERGHADKMVLSHDANCYFDALPDELVSQVMPNWHYLHIHNDVIPALKERGVTDEQLHTMLVDNPRRIFERQGAYE

SEQ ID NO: 175 - protein, 326 aa, Artificial Sequence
  Synthetic
MSTLNTARGSIDTAALGVTLMHEHVFIMTTEIAENYPEAWGDEDRRVADAVKRLNELKARGVDTIVDLTVIGLGRYIPRIARVAAETELNIVVATGLYTYNDVPMYFHYLGPGGELGGPEIMTDMFVRDIEQGIADTGIKAGILKCATDTPGVTPGVERVLRAVAQAHKRTGVPISTHTHAGLRRGLEQQKIFEEEGVDLSRVIIGHSGDSTDIGYLEELIAAGSYLGMDRFGIDAFLPFEDRVNTVAQMCERGHADKMVLSHDANCYFDALPDELVSQVMPNWHYLHIHNDVIPALKERGVTDEQLHTMLVDNPRRIFERQGAYE

SEQ ID NO: 176 - protein, 326 aa, Artificial Sequence
  Synthetic
MSEINTARGSIDTAALGVTLMHEHVFIMTTEIAENYPEAWGDEDRRVADAVKRLNELKARGVDTIVDLTVIGLGRYIPRIARVAAETELNIVVATGLYTYNDVPMYFHYLGPGGELGGPEIMTDMFVRDIEQGIADTGIKAGILKCATDTPGVTPGVERVLRAVAQAHKRTGVPISTHTHAGLRRGLEQQKIFEEEGVDLSRVIIGHSGDSTDIGYLEELIAAGSYLGMDRFGIDAFLPFEDRVNTVAQMCERGHADKMVLSHDANCYFDALPDELVSQVMPNWHYLHIHNDVIPALKERGVTDEQLHTMLVDNPRRIFERQGAYE

SEQ ID NO: 177 - protein, 326 aa, Artificial Sequence
  Synthetic
MSEVNTARGSIDTAALGVTLMHEHVFIMTTEIAENYPEAWGDEDRRVADAVKRLNELKARGVDTIVDLTVIGLGRYIPRIARVAAETELNIVVATGLYTYNDVPMYFHYLGPGGELGGPEIMTDMFVRDIEQGIADTGIKAGILKCATDTPGVTPGVERVLRAVAQAHKRTGVPISTHTHAGLRRGLEQQKIFEEEGVDLSRVIIGHSGDSTDIGYLEELIAAGSYLGMDRFGIDAFLPFEDRVNTVAQMCERGHADKMVLSHDANCYFDALPDELVSQVMPNWHYLHIHNDVIPALKERGVTDEQLHTMLVDNPRRIFERQGAYE

SEQ ID NO: 178 - protein, 326 aa, Artificial Sequence
  Synthetic
MSELMTARGSIDTAALGVTLMHEHVFIMTTEIAENYPEAWGDEDRRVADAVKRLNELKARGVDTIVDLTVIGLGRYIPRIARVAAETELNIVVATGLYTYNDVPMYFHYLGPGGELGGPEIMTDMFVRDIEQGIADTGIKAGILKCATDTPGVTPGVERVLRAVAQAHKRTGVPISTHTHAGLRRGLEQQKIFEEEGVDLSRVIIGHSGDSTDIGYLEELIAAGSYLGMDRFGIDAFLPFEDRVNTVAQMCERGHADKMVLSHDANCYFDALPDELVSQVMPNWHYLHIHNDVIPALKERGVTDEQLHTMLVDNPRRIFERQGAYE

SEQ ID NO: 179 - protein, 326 aa, Artificial Sequence
  Synthetic
MSELQTARGSIDTAALGVTLMHEHVFIMTTEIAENYPEAWGDEDRRVADAVKRLNELKARGVDTIVDLTVIGLGRYIPRIARVAAETELNIVVATGLYTYNDVPMYFHYLGPGGELGGPEIMTDMFVRDIEQGIADTGIKAGILKCATDTPGVTPGVERVLRAVAQAHKRTGVPISTHTHAGLRRGLEQQKIFEEEGVDLSRVIIGHSGDSTDIGYLEELIAAGSYLGMDRFGIDAFLPFEDRVNTVAQMCERGHADKMVLSHDANCYFDALPDELVSQVMPNWHYLHIHNDVIPALKERGVTDEQLHTMLVDNPRRIFERQGAYE

SEQ ID NO: 180 - protein, 326 aa, Artificial Sequence
  Synthetic
MSELRTARGSIDTAALGVTLMHEHVFIMTTEIAENYPEAWGDEDRRVADAVKRLNELKARGVDTIVDLTVIGLGRYIPRIARVAAETELNIVVATGLYTYNDVPMYFHYLGPGGELGGPEIMTDMFVRDIEQGIADTGIKAGILKCATDTPGVTPGVERVLRAVAQAHKRTGVPISTHTHAGLRRGLEQQKIFEEEGVDLSRVIIGHSGDSTDIGYLEELIAAGSYLGMDRFGIDAFLPFEDRVNTVAQMCERGHADKMVLSHDANCYFDALPDELVSQVMPNWHYLHIHNDVIPALKERGVTDEQLHTMLVDNPRRIFERQGAYE

SEQ ID NO: 181 - protein, 326 aa, Artificial Sequence
  Synthetic
MSELNTACGSIDTAALGVTLMHEHVFIMTTEIAENYPEAWGDEDRRVADAVKRLNELKARGVDTIVDLTVIGLGRYIPRIARVAAETELNIVVATGLYTYNDVPMYFHYLGPGGELGGPEIMTDMFVRDIEQGIADTGIKAGILKCATDTPGVTPGVERVLRAVAQAHKRTGVPISTHTHAGLRRGLEQQKIFEEEGVDLSRVIIGHSGDSTDIGYLEELIAAGSYLGMDRFGIDAFLPFEDRVNTVAQMCERGHADKMVLSHDANCYFDALPDELVSQVMPNWHYLHIHNDVIPALKERGVTDEQLHTMLVDNPRRIFERQGAYE

SEQ ID NO: 182 - protein, 326 aa, Artificial Sequence
  Synthetic
MSELNTALGSIDTAALGVTLMHEHVFIMTTEIAENYPEAWGDEDRRVADAVKRLNELKARGVDTIVDLTVIGLGRYIPRIARVAAETELNIVVATGLYTYNDVPMYFHYLGPGGELGGPEIMTDMFVRDIEQGIADTGIKAGILKCATDTPGVTPGVERVLRAVAQAHKRTGVPISTHTHAGLRRGLEQQKIFEEEGVDLSRVIIGHSGDSTDIGYLEELIAAGSYLGMDRFGIDAFLPFEDRVNTVAQMCERGHADKMVLSHDANCYFDALPDELVSQVMPNWHYLHIHNDVIPALKERGVTDEQLHTMLVDNPRRIFERQGAYE

SEQ ID NO: 183 - protein, 326 aa, Artificial Sequence
  Synthetic
MSELNTATGSIDTAALGVTLMHEHVFIMTTEIAENYPEAWGDEDRRVADAVKRLNELKARGVDTIVDLTVIGLGRYIPRIARVAAETELNIVVATGLYTYNDVPMYFHYLGPGGELGGPEIMTDMFVRDIEQGIADTGIKAGILKCATDTPGVTPGVERVLRAVAQAHKRTGVPISTHTHAGLRRGLEQQKIFEEEGVDLSRVIIGHSGDSTDIGYLEELIAAGSYLGMDRFGIDAFLPFEDRVNTVAQMCERGHADKMVLSHDANCYFDALPDELVSQVMPNWHYLHIHNDVIPALKERGVTDEQLHTMLVDNPRRIFERQGAYE

SEQ ID NO: 184 - protein, 326 aa, Artificial Sequence
  Synthetic
MSELNTARGPIDTAALGVTLMHEHVFIMTTEIAENYPEAWGDEDRRVADAVKRLNELKARGVDTIVDLTVIGLGRYIPRIARVAAETELNIVVATGLYTYNDVPMYFHYLGPGGELGGPEIMTDMFVRDIEQGIADTGIKAGILKCATDTPGVTPGVERVLRAVAQAHKRTGVPISTHTHAGLRRGLEQQKIFEEEGVDLSRVIIGHSGDSTDIGYLEELIAAGSYLGMDRFGIDAFLPFEDRVNTVAQMCERGHADKMVLSHDANCYFDALPDELVSQVMPNWHYLHIHNDVIPALKERGVTDEQLHTMLVDNPRRIFERQGAYE

SEQ ID NO: 185 - protein, 326 aa, Artificial Sequence
  Synthetic
MSELNTARGSIETAALGVTLMHEHVFIMTTEIAENYPEAWGDEDRRVADAVKRLNELKARGVDTIVDLTVIGLGRYIPRIARVAAETELNIVVATGLYTYNDVPMYFHYLGPGGELGGPEIMTDMFVRDIEQGIADTGIKAGILKCATDTPGVTPGVERVLRAVAQAHKRTGVPISTHTHAGLRRGLEQQKIFEEEGVDLSRVIIGHSGDSTDIGYLEELIAAGSYLGMDRFGIDAFLPFEDRVNTVAQMCERGHADKMVLSHDANCYFDALPDELVSQVMPNWHYLHIHNDVIPALKERGVTDEQLHTMLVDNPRRIFERQGAYE

SEQ ID NO: 186 - protein, 326 aa, Artificial Sequence
  Synthetic
MSELNTARGSIPTAALGVTLMHEHVFIMTTEIAENYPEAWGDEDRRVADAVKRLNELKARGVDTIVDLTVIGLGRYIPRIARVAAETELNIVVATGLYTYNDVPMYFHYLGPGGELGGPEIMTDMFVRDIEQGIADTGIKAGILKCATDTPGVTPGVERVLRAVAQAHKRTGVPISTHTHAGLRRGLEQQKIFEEEGVDLSRVIIGHSGDSTDIGYLEELIAAGSYLGMDRFGIDAFLPFEDRVNTVAQMCERGHADKMVLSHDANCYFDALPDELVSQVMPNWHYLHIHNDVIPALKERGVTDEQLHTMLVDNPRRIFERQGAYE

SEQ ID NO: 187 - protein, 326 aa, Artificial Sequence
  Synthetic
MSELNTARGSIDAAALGVTLMHEHVFIMTTEIAENYPEAWGDEDRRVADAVKRLNELKARGVDTIVDLTVIGLGRYIPRIARVAAETELNIVVATGLYTYNDVPMYFHYLGPGGELGGPEIMTDMFVRDIEQGIADTGIKAGILKCATDTPGVTPGVERVLRAVAQAHKRTGVPISTHTHAGLRRGLEQQKIFEEEGVDLSRVIIGHSGDSTDIGYLEELIAAGSYLGMDRFGIDAFLPFEDRVNTVAQMCERGHADKMVLSHDANCYFDALPDELVSQVMPNWHYLHIHNDVIPALKERGVTDEQLHTMLVDNPRRIFERQGAYE

SEQ ID NO: 188 - protein, 326 aa, Artificial Sequence
  Synthetic
MSELNTARGSIDPAALGVTLMHEHVFIMTTEIAENYPEAWGDEDRRVADAVKRLNELKARGVDTIVDLTVIGLGRYIPRIARVAAETELNIVVATGLYTYNDVPMYFHYLGPGGELGGPEIMTDMFVRDIEQGIADTGIKAGILKCATDTPGVTPGVERVLRAVAQAHKRTGVPISTHTHAGLRRGLEQQKIFEEEGVDLSRVIIGHSGDSTDIGYLEELIAAGSYLGMDRFGIDAFLPFEDRVNTVAQMCERGHADKMVLSHDANCYFDALPDELVSQVMPNWHYLHIHNDVIPALKERGVTDEQLHTMLVDNPRRIFERQGAYE

SEQ ID NO: 189 - protein, 326 aa, Artificial Sequence
  Synthetic
MSELNTARGSIDTDALGVTLMHEHVFIMTTEIAENYPEAWGDEDRRVADAVKRLNELKARGVDTIVDLTVIGLGRYIPRIARVAAETELNIVVATGLYTYNDVPMYFHYLGPGGELGGPEIMTDMFVRDIEQGIADTGIKAGILKCATDTPGVTPGVERVLRAVAQAHKRTGVPISTHTHAGLRRGLEQQKIFEEEGVDLSRVIIGHSGDSTDIGYLEELIAAGSYLGMDRFGIDAFLPFEDRVNTVAQMCERGHADKMVLSHDANCYFDALPDELVSQVMPNWHYLHIHNDVIPALKERGVTDEQLHTMLVDNPRRIFERQGAYE

SEQ ID NO: 190 - protein, 326 aa, Artificial Sequence
  Synthetic
MSELNTARGSIDTEALGVTLMHEHVFIMTTEIAENYPEAWGDEDRRVADAVKRLNELKARGVDTIVDLTVIGLGRYIPRIARVAAETELNIVVATGLYTYNDVPMYFHYLGPGGELGGPEIMTDMFVRDIEQGIADTGIKAGILKCATDTPGVTPGVERVLRAVAQAHKRTGVPISTHTHAGLRRGLEQQKIFEEEGVDLSRVIIGHSGDSTDIGYLEELIAAGSYLGMDRFGIDAFLPFEDRVNTVAQMCERGHADKMVLSHDANCYFDALPDELVSQVMPNWHYLHIHNDVIPALKERGVTDEQLHTMLVDNPRRIFERQGAYE

SEQ ID NO: 191 - protein, 326 aa, Artificial Sequence
  Synthetic
MSELNTARGSIDTSALGVTLMHEHVFIMTTEIAENYPEAWGDEDRRVADAVKRLNELKARGVDTIVDLTVIGLGRYIPRIARVAAETELNIVVATGLYTYNDVPMYFHYLGPGGELGGPEIMTDMFVRDIEQGIADTGIKAGILKCATDTPGVTPGVERVLRAVAQAHKRTGVPISTHTHAGLRRGLEQQKIFEEEGVDLSRVIIGHSGDSTDIGYLEELIAAGSYLGMDRFGIDAFLPFEDRVNTVAQMCERGHADKMVLSHDANCYFDALPDELVSQVMPNWHYLHIHNDVIPALKERGVTDEQLHTMLVDNPRRIFERQGAYE

SEQ ID NO: 192 - protein, 326 aa, Artificial Sequence
  Synthetic
MSELNTARGSIDTADLGVTLMHEHVFIMTTEIAENYPEAWGDEDRRVADAVKRLNELKARGVDTIVDLTVIGLGRYIPRIARVAAETELNIVVATGLYTYNDVPMYFHYLGPGGELGGPEIMTDMFVRDIEQGIADTGIKAGILKCATDTPGVTPGVERVLRAVAQAHKRTGVPISTHTHAGLRRGLEQQKIFEEEGVDLSRVIIGHSGDSTDIGYLEELIAAGSYLGMDRFGIDAFLPFEDRVNTVAQMCERGHADKMVLSHDANCYFDALPDELVSQVMPNWHYLHIHNDVIPALKERGVTDEQLHTMLVDNPRRIFERQGAYE

SEQ ID NO: 193 - protein, 326 aa, Artificial Sequence
  Synthetic
MSELNTARGSIDTAELGVTLMHEHVFIMTTEIAENYPEAWGDEDRRVADAVKRLNELKARGVDTIVDLTVIGLGRYIPRIARVAAETELNIVVATGLYTYNDVPMYFHYLGPGGELGGPEIMTDMFVRDIEQGIADTGIKAGILKCATDTPGVTPGVERVLRAVAQAHKRTGVPISTHTHAGLRRGLEQQKIFEEEGVDLSRVIIGHSGDSTDIGYLEELIAAGSYLGMDRFGIDAFLPFEDRVNTVAQMCERGHADKMVLSHDANCYFDALPDELVSQVMPNWHYLHIHNDVIPALKERGVTDEQLHTMLVDNPRRIFERQGAYE

SEQ ID NO: 194 - protein, 326 aa, Artificial Sequence
  Synthetic
MSELNTARGSIDTAQLGVTLMHEHVFIMTTEIAENYPEAWGDEDRRVADAVKRLNELKARGVDTIVDLTVIGLGRYIPRIARVAAETELNIVVATGLYTYNDVPMYFHYLGPGGELGGPEIMTDMFVRDIEQGIADTGIKAGILKCATDTPGVTPGVERVLRAVAQAHKRTGVPISTHTHAGLRRGLEQQKIFEEEGVDLSRVIIGHSGDSTDIGYLEELIAAGSYLGMDRFGIDAFLPFEDRVNTVAQMCERGHADKMVLSHDANCYFDALPDELVSQVMPNWHYLHIHNDVIPALKERGVTDEQLHTMLVDNPRRIFERQGAYE

SEQ ID NO: 195 - protein, 326 aa, Artificial Sequence
  Synthetic
MSELNTARGSIDTAAMGVTLMHEHVFIMTTEIAENYPEAWGDEDRRVADAVKRLNELKARGVDTIVDLTVIGLGRYIPRIARVAAETELNIVVATGLYTYNDVPMYFHYLGPGGELGGPEIMTDMFVRDIEQGIADTGIKAGILKCATDTPGVTPGVERVLRAVAQAHKRTGVPISTHTHAGLRRGLEQQKIFEEEGVDLSRVIIGHSGDSTDIGYLEELIAAGSYLGMDRFGIDAFLPFEDRVNTVAQMCERGHADKMVLSHDANCYFDALPDELVSQVMPNWHYLHIHNDVIPALKERGVTDEQLHTMLVDNPRRIFERQGAYE

SEQ ID NO: 196 - protein, 326 aa, Artificial Sequence
  Synthetic
MSELNTARGSIDTAALGITLMHEHVFIMTTEIAENYPEAWGDEDRRVADAVKRLNELKARGVDTIVDLTVIGLGRYIPRIARVAAETELNIVVATGLYTYNDVPMYFHYLGPGGELGGPEIMTDMFVRDIEQGIADTGIKAGILKCATDTPGVTPGVERVLRAVAQAHKRTGVPISTHTHAGLRRGLEQQKIFEEEGVDLSRVIIGHSGDSTDIGYLEELIAAGSYLGMDRFGIDAFLPFEDRVNTVAQMCERGHADKMVLSHDANCYFDALPDELVSQVMPNWHYLHIHNDVIPALKERGVTDEQLHTMLVDNPRRIFERQGAYE

SEQ ID NO: 197 - protein, 326 aa, Artificial Sequence
  Synthetic
MSELNTARGSIDTAALGMTLMHEHVFIMTTEIAENYPEAWGDEDRRVADAVKRLNELKARGVDTIVDLTVIGLGRYIPRIARVAAETELNIVVATGLYTYNDVPMYFHYLGPGGELGGPEIMTDMFVRDIEQGIADTGIKAGILKCATDTPGVTPGVERVLRAVAQAHKRTGVPISTHTHAGLRRGLEQQKIFEEEGVDLSRVIIGHSGDSTDIGYLEELIAAGSYLGMDRFGIDAFLPFEDRVNTVAQMCERGHADKMVLSHDANCYFDALPDELVSQVMPNWHYLHIHNDVIPALKERGVTDEQLHTMLVDNPRRIFERQGAYE

SEQ ID NO: 198 - protein, 326 aa, Artificial Sequence
  Synthetic
MSELNTARGSIDTAALGVTLMHEHVFIDTTEIAENYPEAWGDEDRRVADAVKRLNELKARGVDTIVDLTVIGLGRYIPRIARVAAETELNIVVATGLYTYNDVPMYFHYLGPGGELGGPEIMTDMFVRDIEQGIADTGIKAGILKCATDTPGVTPGVERVLRAVAQAHKRTGVPISTHTHAGLRRGLEQQKIFEEEGVDLSRVIIGHSGDSTDIGYLEELIAAGSYLGMDRFGIDAFLPFEDRVNTVAQMCERGHADKMVLSHDANCYFDALPDELVSQVMPNWHYLHIHNDVIPALKERGVTDEQLHTMLVDNPRRIFERQGAYE

SEQ ID NO: 199 - protein, 326 aa, Artificial Sequence
  Synthetic
MSELNTARGSIDTAALGVTLMHEHVFIMSTEIAENYPEAWGDEDRRVADAVKRLNELKARGVDTIVDLTVIGLGRYIPRIARVAAETELNIVVATGLYTYNDVPMYFHYLGPGGELGGPEIMTDMFVRDIEQGIADTGIKAGILKCATDTPGVTPGVERVLRAVAQAHKRTGVPISTHTHAGLRRGLEQQKIFEEEGVDLSRVIIGHSGDSTDIGYLEELIAAGSYLGMDRFGIDAFLPFEDRVNTVAQMCERGHADKMVLSHDANCYFDALPDELVSQVMPNWHYLHIHNDVIPALKERGVTDEQLHTMLVDNPRRIFERQGAYE

SEQ ID NO: 200 - protein, 326 aa, Artificial Sequence
  Synthetic
MSELNTARGSIDTAALGVTLMHEHVFIMTPEIAENYPEAWGDEDRRVADAVKRLNELKARGVDTIVDLTVIGLGRYIPRIARVAAETELNIVVATGLYTYNDVPMYFHYLGPGGELGGPEIMTDMFVRDIEQGIADTGIKAGILKCATDTPGVTPGVERVLRAVAQAHKRTGVPISTHTHAGLRRGLEQQKIFEEEGVDLSRVIIGHSGDSTDIGYLEELIAAGSYLGMDRFGIDAFLPFEDRVNTVAQMCERGHADKMVLSHDANCYFDALPDELVSQVMPNWHYLHIHNDVIPALKERGVTDEQLHTMLVDNPRRIFERQGAYE

SEQ ID NO: 201 - protein, 326 aa, Artificial Sequence
  Synthetic
MSELNTARGSIDTAALGVTLMHEHVFIMTSEIAENYPEAWGDEDRRVADAVKRLNELKARGVDTIVDLTVIGLGRYIPRIARVAAETELNIVVATGLYTYNDVPMYFHYLGPGGELGGPEIMTDMFVRDIEQGIADTGIKAGILKCATDTPGVTPGVERVLRAVAQAHKRTGVPISTHTHAGLRRGLEQQKIFEEEGVDLSRVIIGHSGDSTDIGYLEELIAAGSYLGMDRFGIDAFLPFEDRVNTVAQMCERGHADKMVLSHDANCYFDALPDELVSQVMPNWHYLHIHNDVIPALKERGVTDEQLHTMLVDNPRRIFERQGAYE

SEQ ID NO: 202 - protein, 326 aa, Artificial Sequence
  Synthetic
MSELNTARGSIDTAALGVTLMHEHVFIMTWEIAENYPEAWGDEDRRVADAVKRLNELKARGVDTIVDLTVIGLGRYIPRIARVAAETELNIVVATGLYTYNDVPMYFHYLGPGGELGGPEIMTDMFVRDIEQGIADTGIKAGILKCATDTPGVTPGVERVLRAVAQAHKRTGVPISTHTHAGLRRGLEQQKIFEEEGVDLSRVIIGHSGDSTDIGYLEELIAAGSYLGMDRFGIDAFLPFEDRVNTVAQMCERGHADKMVLSHDANCYFDALPDELVSQVMPNWHYLHIHNDVIPALKERGVTDEQLHTMLVDNPRRIFERQGAYE

SEQ ID NO: 203 - protein, 326 aa, Artificial Sequence
  Synthetic
MSELNTARGSIDTAALGVTLMHEHVFIMTTGIAENYPEAWGDEDRRVADAVKRLNELKARGVDTIVDLTVIGLGRYIPRIARVAAETELNIVVATGLYTYNDVPMYFHYLGPGGELGGPEIMTDMFVRDIEQGIADTGIKAGILKCATDTPGVTPGVERVLRAVAQAHKRTGVPISTHTHAGLRRGLEQQKIFEEEGVDLSRVIIGHSGDSTDIGYLEELIAAGSYLGMDRFGIDAFLPFEDRVNTVAQMCERGHADKMVLSHDANCYFDALPDELVSQVMPNWHYLHIHNDVIPALKERGVTDEQLHTMLVDNPRRIFERQGAYE

SEQ ID NO: 204 - protein, 326 aa, Artificial Sequence
  Synthetic
MSELNTARGSIDTAALGVTLMHEHVFIMTTEFAENYPEAWGDEDRRVADAVKRLNELKARGVDTIVDLTVIGLGRYIPRIARVAAETELNIVVATGLYTYNDVPMYFHYLGPGGELGGPEIMTDMFVRDIEQGIADTGIKAGILKCATDTPGVTPGVERVLRAVAQAHKRTGVPISTHTHAGLRRGLEQQKIFEEEGVDLSRVIIGHSGDSTDIGYLEELIAAGSYLGMDRFGIDAFLPFEDRVNTVAQMCERGHADKMVLSHDANCYFDALPDELVSQVMPNWHYLHIHNDVIPALKERGVTDEQLHTMLVDNPRRIFERQGAYE

SEQ ID NO: 205 - protein, 326 aa, Artificial Sequence
  Synthetic
MSELNTARGSIDTAALGVTLMHEHVFIMTTEMAENYPEAWGDEDRRVADAVKRLNELKARGVDTIVDLTVIGLGRYIPRIARVAAETELNIVVATGLYTYNDVPMYFHYLGPGGELGGPEIMTDMFVRDIEQGIADTGIKAGILKCATDTPGVTPGVERVLRAVAQAHKRTGVPISTHTHAGLRRGLEQQKIFEEEGVDLSRVIIGHSGDSTDIGYLEELIAAGSYLGMDRFGIDAFLPFEDRVNTVAQMCERGHADKMVLSHDANCYFDALPDELVSQVMPNWHYLHIHNDVIPALKERGVTDEQLHTMLVDNPRRIFERQGAYE

SEQ ID NO: 206 - protein, 326 aa, Artificial Sequence
  Synthetic
MSELNTARGSIDTAALGVTLMHEHVFIMTTEVAENYPEAWGDEDRRVADAVKRLNELKARGVDTIVDLTVIGLGRYIPRIARVAAETELNIVVATGLYTYNDVPMYFHYLGPGGELGGPEIMTDMFVRDIEQGIADTGIKAGILKCATDTPGVTPGVERVLRAVAQAHKRTGVPISTHTHAGLRRGLEQQKIFEEEGVDLSRVIIGHSGDSTDIGYLEELIAAGSYLGMDRFGIDAFLPFEDRVNTVAQMCERGHADKMVLSHDANCYFDALPDELVSQVMPNWHYLHIHNDVIPALKERGVTDEQLHTMLVDNPRRIFERQGAYE

SEQ ID NO: 207 - protein, 326 aa, Artificial Sequence
  Synthetic
MSELNTARGSIDTAALGVTLMHEHVFIMTTEWAENYPEAWGDEDRRVADAVKRLNELKARGVDTIVDLTVIGLGRYIPRIARVAAETELNIVVATGLYTYNDVPMYFHYLGPGGELGGPEIMTDMFVRDIEQGIADTGIKAGILKCATDTPGVTPGVERVLRAVAQAHKRTGVPISTHTHAGLRRGLEQQKIFEEEGVDLSRVIIGHSGDSTDIGYLEELIAAGSYLGMDRFGIDAFLPFEDRVNTVAQMCERGHADKMVLSHDANCYFDALPDELVSQVMPNWHYLHIHNDVIPALKERGVTDEQLHTMLVDNPRRIFERQGAYE

SEQ ID NO: 208 - protein, 326 aa, Artificial Sequence
  Synthetic
MSELNTARGSIDTAALGVTLMHEHVFIMTTEIWENYPEAWGDEDRRVADAVKRLNELKARGVDTIVDLTVIGLGRYIPRIARVAAETELNIVVATGLYTYNDVPMYFHYLGPGGELGGPEIMTDMFVRDIEQGIADTGIKAGILKCATDTPGVTPGVERVLRAVAQAHKRTGVPISTHTHAGLRRGLEQQKIFEEEGVDLSRVIIGHSGDSTDIGYLEELIAAGSYLGMDRFGIDAFLPFEDRVNTVAQMCERGHADKMVLSHDANCYFDALPDELVSQVMPNWHYLHIHNDVIPALKERGVTDEQLHTMLVDNPRRIFERQGAYE

SEQ ID NO: 209 - protein, 326 aa, Artificial Sequence
  Synthetic
MSELNTARGSIDTAALGVTLMHEHVFIMTTEIAQNYPEAWGDEDRRVADAVKRLNELKARGVDTIVDLTVIGLGRYIPRIARVAAETELNIVVATGLYTYNDVPMYFHYLGPGGELGGPEIMTDMFVRDIEQGIADTGIKAGILKCATDTPGVTPGVERVLRAVAQAHKRTGVPISTHTHAGLRRGLEQQKIFEEEGVDLSRVIIGHSGDSTDIGYLEELIAAGSYLGMDRFGIDAFLPFEDRVNTVAQMCERGHADKMVLSHDANCYFDALPDELVSQVMPNWHYLHIHNDVIPALKERGVTDEQLHTMLVDNPRRIFERQGAYE

SEQ ID NO: 210 - protein, 326 aa, Artificial Sequence
  Synthetic
MSELNTARGSIDTAALGVTLMHEHVFIMTTEIAEDYPEAWGDEDRRVADAVKRLNELKARGVDTIVDLTVIGLGRYIPRIARVAAETELNIVVATGLYTYNDVPMYFHYLGPGGELGGPEIMTDMFVRDIEQGIADTGIKAGILKCATDTPGVTPGVERVLRAVAQAHKRTGVPISTHTHAGLRRGLEQQKIFEEEGVDLSRVIIGHSGDSTDIGYLEELIAAGSYLGMDRFGIDAFLPFEDRVNTVAQMCERGHADKMVLSHDANCYFDALPDELVSQVMPNWHYLHIHNDVIPALKERGVTDEQLHTMLVDNPRRIFERQGAYE

SEQ ID NO: 211 - protein, 326 aa, Artificial Sequence
  Synthetic
MSELNTARGSIDTAALGVTLMHEHVFIMTTEIAENFPEAWGDEDRRVADAVKRLNELKARGVDTIVDLTVIGLGRYIPRIARVAAETELNIVVATGLYTYNDVPMYFHYLGPGGELGGPEIMTDMFVRDIEQGIADTGIKAGILKCATDTPGVTPGVERVLRAVAQAHKRTGVPISTHTHAGLRRGLEQQKIFEEEGVDLSRVIIGHSGDSTDIGYLEELIAAGSYLGMDRFGIDAFLPFEDRVNTVAQMCERGHADKMVLSHDANCYFDALPDELVSQVMPNWHYLHIHNDVIPALKERGVTDEQLHTMLVDNPRRIFERQGAYE

SEQ ID NO: 212 - protein, 326 aa, Artificial Sequence
  Synthetic
MSELNTARGSIDTAALGVTLMHEHVFIMTTEIAENHPEAWGDEDRRVADAVKRLNELKARGVDTIVDLTVIGLGRYIPRIARVAAETELNIVVATGLYTYNDVPMYFHYLGPGGELGGPEIMTDMFVRDIEQGIADTGIKAGILKCATDTPGVTPGVERVLRAVAQAHKRTGVPISTHTHAGLRRGLEQQKIFEEEGVDLSRVIIGHSGDSTDIGYLEELIAAGSYLGMDRFGIDAFLPFEDRVNTVAQMCERGHADKMVLSHDANCYFDALPDELVSQVMPNWHYLHIHNDVIPALKERGVTDEQLHTMLVDNPRRIFERQGAYE

SEQ ID NO: 213 - protein, 326 aa, Artificial Sequence
  Synthetic
MSELNTARGSIDTAALGVTLMHEHVFIMTTEIAENWPEAWGDEDRRVADAVKRLNELKARGVDTIVDLTVIGLGRYIPRIARVAAETELNIVVATGLYTYNDVPMYFHYLGPGGELGGPEIMTDMFVRDIEQGIADTGIKAGILKCATDTPGVTPGVERVLRAVAQAHKRTGVPISTHTHAGLRRGLEQQKIFEEEGVDLSRVIIGHSGDSTDIGYLEELIAAGSYLGMDRFGIDAFLPFEDRVNTVAQMCERGHADKMVLSHDANCYFDALPDELVSQVMPNWHYLHIHNDVIPALKERGVTDEQLHTMLVDNPRRIFERQGAYE

SEQ ID NO: 214 - protein, 326 aa, Artificial Sequence
  Synthetic
MSELNTARGSIDTAALGVTLMHEHVFIMTTEIAENYPDAWGDEDRRVADAVKRLNELKARGVDTIVDLTVIGLGRYIPRIARVAAETELNIVVATGLYTYNDVPMYFHYLGPGGELGGPEIMTDMFVRDIEQGIADTGIKAGILKCATDTPGVTPGVERVLRAVAQAHKRTGVPISTHTHAGLRRGLEQQKIFEEEGVDLSRVIIGHSGDSTDIGYLEELIAAGSYLGMDRFGIDAFLPFEDRVNTVAQMCERGHADKMVLSHDANCYFDALPDELVSQVMPNWHYLHIHNDVIPALKERGVTDEQLHTMLVDNPRRIFERQGAYE

SEQ ID NO: 215 - protein, 326 aa, Artificial Sequence
  Synthetic
MSELNTARGSIDTAALGVTLMHEHVFIMTTEIAENYPHAWGDEDRRVADAVKRLNELKARGVDTIVDLTVIGLGRYIPRIARVAAETELNIVVATGLYTYNDVPMYFHYLGPGGELGGPEIMTDMFVRDIEQGIADTGIKAGILKCATDTPGVTPGVERVLRAVAQAHKRTGVPISTHTHAGLRRGLEQQKIFEEEGVDLSRVIIGHSGDSTDIGYLEELIAAGSYLGMDRFGIDAFLPFEDRVNTVAQMCERGHADKMVLSHDANCYFDALPDELVSQVMPNWHYLHIHNDVIPALKERGVTDEQLHTMLVDNPRRIFERQGAYE

SEQ ID NO: 216 - protein, 326 aa, Artificial Sequence
  Synthetic
MSELNTARGSIDTAALGVTLMHEHVFIMTTEIAENYPEPWGDEDRRVADAVKRLNELKARGVDTIVDLTVIGLGRYIPRIARVAAETELNIVVATGLYTYNDVPMYFHYLGPGGELGGPEIMTDMFVRDIEQGIADTGIKAGILKCATDTPGVTPGVERVLRAVAQAHKRTGVPISTHTHAGLRRGLEQQKIFEEEGVDLSRVIIGHSGDSTDIGYLEELIAAGSYLGMDRFGIDAFLPFEDRVNTVAQMCERGHADKMVLSHDANCYFDALPDELVSQVMPNWHYLHIHNDVIPALKERGVTDEQLHTMLVDNPRRIFERQGAYE

SEQ ID NO: 217 - protein, 326 aa, Artificial Sequence
  Synthetic
MSELNTARGSIDTAALGVTLMHEHVFIMTTEIAENYPEAFGDEDRRVADAVKRLNELKARGVDTIVDLTVIGLGRYIPRIARVAAETELNIVVATGLYTYNDVPMYFHYLGPGGELGGPEIMTDMFVRDIEQGIADTGIKAGILKCATDTPGVTPGVERVLRAVAQAHKRTGVPISTHTHAGLRRGLEQQKIFEEEGVDLSRVIIGHSGDSTDIGYLEELIAAGSYLGMDRFGIDAFLPFEDRVNTVAQMCERGHADKMVLSHDANCYFDALPDELVSQVMPNWHYLHIHNDVIPALKERGVTDEQLHTMLVDNPRRIFERQGAYE

SEQ ID NO: 218 - protein, 326 aa, Artificial Sequence
  Synthetic
MSELNTARGSIDTAALGVTLMHEHVFIMTTEIAENYPEAWGNEDRRVADAVKRLNELKARGVDTIVDLTVIGLGRYIPRIARVAAETELNIVVATGLYTYNDVPMYFHYLGPGGELGGPEIMTDMFVRDIEQGIADTGIKAGILKCATDTPGVTPGVERVLRAVAQAHKRTGVPISTHTHAGLRRGLEQQKIFEEEGVDLSRVIIGHSGDSTDIGYLEELIAAGSYLGMDRFGIDAFLPFEDRVNTVAQMCERGHADKMVLSHDANCYFDALPDELVSQVMPNWHYLHIHNDVIPALKERGVTDEQLHTMLVDNPRRIFERQGAYE

SEQ ID NO: 219 - protein, 326 aa, Artificial Sequence
  Synthetic
MSELNTARGSIDTAALGVTLMHEHVFIMTTEIAENYPEAWGDDDRRVADAVKRLNELKARGVDTIVDLTVIGLGRYIPRIARVAAETELNIVVATGLYTYNDVPMYFHYLGPGGELGGPEIMTDMFVRDIEQGIADTGIKAGILKCATDTPGVTPGVERVLRAVAQAHKRTGVPISTHTHAGLRRGLEQQKIFEEEGVDLSRVIIGHSGDSTDIGYLEELIAAGSYLGMDRFGIDAFLPFEDRVNTVAQMCERGHADKMVLSHDANCYFDALPDELVSQVMPNWHYLHIHNDVIPALKERGVTDEQLHTMLVDNPRRIFERQGAYE

SEQ ID NO: 220 - protein, 326 aa, Artificial Sequence
  Synthetic
MSELNTARGSIDTAALGVTLMHEHVFIMTTEIAENYPEAWGDEERRVADAVKRLNELKARGVDTIVDLTVIGLGRYIPRIARVAAETELNIVVATGLYTYNDVPMYFHYLGPGGELGGPEIMTDMFVRDIEQGIADTGIKAGILKCATDTPGVTPGVERVLRAVAQAHKRTGVPISTHTHAGLRRGLEQQKIFEEEGVDLSRVIIGHSGDSTDIGYLEELIAAGSYLGMDRFGIDAFLPFEDRVNTVAQMCERGHADKMVLSHDANCYFDALPDELVSQVMPNWHYLHIHNDVIPALKERGVTDEQLHTMLVDNPRRIFERQGAYE

SEQ ID NO: 221 - protein, 326 aa, Artificial Sequence
  Synthetic
MSELNTARGSIDTAALGVTLMHEHVFIMTTEIAENYPEAWGDENRRVADAVKRLNELKARGVDTIVDLTVIGLGRYIPRIARVAAETELNIVVATGLYTYNDVPMYFHYLGPGGELGGPEIMTDMFVRDIEQGIADTGIKAGILKCATDTPGVTPGVERVLRAVAQAHKRTGVPISTHTHAGLRRGLEQQKIFEEEGVDLSRVIIGHSGDSTDIGYLEELIAAGSYLGMDRFGIDAFLPFEDRVNTVAQMCERGHADKMVLSHDANCYFDALPDELVSQVMPNWHYLHIHNDVIPALKERGVTDEQLHTMLVDNPRRIFERQGAYE

SEQ ID NO: 222 - protein, 326 aa, Artificial Sequence
  Synthetic
MSELNTARGSIDTAALGVTLMHEHVFIMTTEIAENYPEAWGDEDRRIADAVKRLNELKARGVDTIVDLTVIGLGRYIPRIARVAAETELNIVVATGLYTYNDVPMYFHYLGPGGELGGPEIMTDMFVRDIEQGIADTGIKAGILKCATDTPGVTPGVERVLRAVAQAHKRTGVPISTHTHAGLRRGLEQQKIFEEEGVDLSRVIIGHSGDSTDIGYLEELIAAGSYLGMDRFGIDAFLPFEDRVNTVAQMCERGHADKMVLSHDANCYFDALPDELVSQVMPNWHYLHIHNDVIPALKERGVTDEQLHTMLVDNPRRIFERQGAYE

SEQ ID NO: 223 - protein, 326 aa, Artificial Sequence
  Synthetic
MSELNTARGSIDTAALGVTLMHEHVFIMTTEIAENYPEAWGDEDRRMADAVKRLNELKARGVDTIVDLTVIGLGRYIPRIARVAAETELNIVVATGLYTYNDVPMYFHYLGPGGELGGPEIMTDMFVRDIEQGIADTGIKAGILKCATDTPGVTPGVERVLRAVAQAHKRTGVPISTHTHAGLRRGLEQQKIFEEEGVDLSRVIIGHSGDSTDIGYLEELIAAGSYLGMDRFGIDAFLPFEDRVNTVAQMCERGHADKMVLSHDANCYFDALPDELVSQVMPNWHYLHIHNDVIPALKERGVTDEQLHTMLVDNPRRIFERQGAYE

SEQ ID NO: 224 - protein, 326 aa, Artificial Sequence
  Synthetic
MSELNTARGSIDTAALGVTLMHEHVFIMTTEIAENYPEAWGDEDRRVEDAVKRLNELKARGVDTIVDLTVIGLGRYIPRIARVAAETELNIVVATGLYTYNDVPMYFHYLGPGGELGGPEIMTDMFVRDIEQGIADTGIKAGILKCATDTPGVTPGVERVLRAVAQAHKRTGVPISTHTHAGLRRGLEQQKIFEEEGVDLSRVIIGHSGDSTDIGYLEELIAAGSYLGMDRFGIDAFLPFEDRVNTVAQMCERGHADKMVLSHDANCYFDALPDELVSQVMPNWHYLHIHNDVIPALKERGVTDEQLHTMLVDNPRRIFERQGAYE

SEQ ID NO: 225 - protein, 326 aa, Artificial Sequence
  Synthetic
MSELNTARGSIDTAALGVTLMHEHVFIMTTEIAENYPEAWGDEDRRVWDAVKRLNELKARGVDTIVDLTVIGLGRYIPRIARVAAETELNIVVATGLYTYNDVPMYFHYLGPGGELGGPEIMTDMFVRDIEQGIADTGIKAGILKCATDTPGVTPGVERVLRAVAQAHKRTGVPISTHTHAGLRRGLEQQKIFEEEGVDLSRVIIGHSGDSTDIGYLEELIAAGSYLGMDRFGIDAFLPFEDRVNTVAQMCERGHADKMVLSHDANCYFDALPDELVSQVMPNWHYLHIHNDVIPALKERGVTDEQLHTMLVDNPRRIFERQGAYE

SEQ ID NO: 226 - protein, 326 aa, Artificial Sequence
  Synthetic
MSELNTARGSIDTAALGVTLMHEHVFIMTTEIAENYPEAWGDEDRRVACAVKRLNELKARGVDTIVDLTVIGLGRYIPRIARVAAETELNIVVATGLYTYNDVPMYFHYLGPGGELGGPEIMTDMFVRDIEQGIADTGIKAGILKCATDTPGVTPGVERVLRAVAQAHKRTGVPISTHTHAGLRRGLEQQKIFEEEGVDLSRVIIGHSGDSTDIGYLEELIAAGSYLGMDRFGIDAFLPFEDRVNTVAQMCERGHADKMVLSHDANCYFDALPDELVSQVMPNWHYLHIHNDVIPALKERGVTDEQLHTMLVDNPRRIFERQGAYE

SEQ ID NO: 227 - protein, 326 aa, Artificial Sequence
  Synthetic
MSELNTARGSIDTAALGVTLMHEHVFIMTTEIAENYPEAWGDEDRRVAHAVKRLNELKARGVDTIVDLTVIGLGRYIPRIARVAAETELNIVVATGLYTYNDVPMYFHYLGPGGELGGPEIMTDMFVRDIEQGIADTGIKAGILKCATDTPGVTPGVERVLRAVAQAHKRTGVPISTHTHAGLRRGLEQQKIFEEEGVDLSRVIIGHSGDSTDIGYLEELIAAGSYLGMDRFGIDAFLPFEDRVNTVAQMCERGHADKMVLSHDANCYFDALPDELVSQVMPNWHYLHIHNDVIPALKERGVTDEQLHTMLVDNPRRIFERQGAYE

SEQ ID NO: 228 - protein, 326 aa, Artificial Sequence
  Synthetic
MSELNTARGSIDTAALGVTLMHEHVFIMTTEIAENYPEAWGDEDRRVAMAVKRLNELKARGVDTIVDLTVIGLGRYIPRIARVAAETELNIVVATGLYTYNDVPMYFHYLGPGGELGGPEIMTDMFVRDIEQGIADTGIKAGILKCATDTPGVTPGVERVLRAVAQAHKRTGVPISTHTHAGLRRGLEQQKIFEEEGVDLSRVIIGHSGDSTDIGYLEELIAAGSYLGMDRFGIDAFLPFEDRVNTVAQMCERGHADKMVLSHDANCYFDALPDELVSQVMPNWHYLHIHNDVIPALKERGVTDEQLHTMLVDNPRRIFERQGAYE

SEQ ID NO: 229 - protein, 326 aa, Artificial Sequence
  Synthetic
MSELNTARGSIDTAALGVTLMHEHVFIMTTEIAENYPEAWGDEDRRVAWAVKRLNELKARGVDTIVDLTVIGLGRYIPRIARVAAETELNIVVATGLYTYNDVPMYFHYLGPGGELGGPEIMTDMFVRDIEQGIADTGIKAGILKCATDTPGVTPGVERVLRAVAQAHKRTGVPISTHTHAGLRRGLEQQKIFEEEGVDLSRVIIGHSGDSTDIGYLEELIAAGSYLGMDRFGIDAFLPFEDRVNTVAQMCERGHADKMVLSHDANCYFDALPDELVSQVMPNWHYLHIHNDVIPALKERGVTDEQLHTMLVDNPRRIFERQGAYE

SEQ ID NO: 230 - protein, 326 aa, Artificial Sequence
  Synthetic
MSELNTARGSIDTAALGVTLMHEHVFIMTTEIAENYPEAWGDEDRRVADAIKRLNELKARGVDTIVDLTVIGLGRYIPRIARVAAETELNIVVATGLYTYNDVPMYFHYLGPGGELGGPEIMTDMFVRDIEQGIADTGIKAGILKCATDTPGVTPGVERVLRAVAQAHKRTGVPISTHTHAGLRRGLEQQKIFEEEGVDLSRVIIGHSGDSTDIGYLEELIAAGSYLGMDRFGIDAFLPFEDRVNTVAQMCERGHADKMVLSHDANCYFDALPDELVSQVMPNWHYLHIHNDVIPALKERGVTDEQLHTMLVDNPRRIFERQGAYE

SEQ ID NO: 231 - protein, 326 aa, Artificial Sequence
  Synthetic
MSELNTARGSIDTAALGVTLMHEHVFIMTTEIAENYPEAWGDEDRRVADALKRLNELKARGVDTIVDLTVIGLGRYIPRIARVAAETELNIVVATGLYTYNDVPMYFHYLGPGGELGGPEIMTDMFVRDIEQGIADTGIKAGILKCATDTPGVTPGVERVLRAVAQAHKRTGVPISTHTHAGLRRGLEQQKIFEEEGVDLSRVIIGHSGDSTDIGYLEELIAAGSYLGMDRFGIDAFLPFEDRVNTVAQMCERGHADKMVLSHDANCYFDALPDELVSQVMPNWHYLHIHNDVIPALKERGVTDEQLHTMLVDNPRRIFERQGAYE

SEQ ID NO: 232 - protein, 326 aa, Artificial Sequence
  Synthetic
MSELNTARGSIDTAALGVTLMHEHVFIMTTEIAENYPEAWGDEDRRVADAVRRLNELKARGVDTIVDLTVIGLGRYIPRIARVAAETELNIVVATGLYTYNDVPMYFHYLGPGGELGGPEIMTDMFVRDIEQGIADTGIKAGILKCATDTPGVTPGVERVLRAVAQAHKRTGVPISTHTHAGLRRGLEQQKIFEEEGVDLSRVIIGHSGDSTDIGYLEELIAAGSYLGMDRFGIDAFLPFEDRVNTVAQMCERGHADKMVLSHDANCYFDALPDELVSQVMPNWHYLHIHNDVIPALKERGVTDEQLHTMLVDNPRRIFERQGAYE

SEQ ID NO: 233 - protein, 326 aa, Artificial Sequence
  Synthetic
MSELNTARGSIDTAALGVTLMHEHVFIMTTEIAENYPEAWGDEDRRVADAVKELNELKARGVDTIVDLTVIGLGRYIPRIARVAAETELNIVVATGLYTYNDVPMYFHYLGPGGELGGPEIMTDMFVRDIEQGIADTGIKAGILKCATDTPGVTPGVERVLRAVAQAHKRTGVPISTHTHAGLRRGLEQQKIFEEEGVDLSRVIIGHSGDSTDIGYLEELIAAGSYLGMDRFGIDAFLPFEDRVNTVAQMCERGHADKMVLSHDANCYFDALPDELVSQVMPNWHYLHIHNDVIPALKERGVTDEQLHTMLVDNPRRIFERQGAYE

SEQ ID NO: 234 - protein, 326 aa, Artificial Sequence
  Synthetic
MSELNTARGSIDTAALGVTLMHEHVFIMTTEIAENYPEAWGDEDRRVADAVKQLNELKARGVDTIVDLTVIGLGRYIPRIARVAAETELNIVVATGLYTYNDVPMYFHYLGPGGELGGPEIMTDMFVRDIEQGIADTGIKAGILKCATDTPGVTPGVERVLRAVAQAHKRTGVPISTHTHAGLRRGLEQQKIFEEEGVDLSRVIIGHSGDSTDIGYLEELIAAGSYLGMDRFGIDAFLPFEDRVNTVAQMCERGHADKMVLSHDANCYFDALPDELVSQVMPNWHYLHIHNDVIPALKERGVTDEQLHTMLVDNPRRIFERQGAYE

SEQ ID NO: 235 - protein, 326 aa, Artificial Sequence
  Synthetic
MSELNTARGSIDTAALGVTLMHEHVFIMTTEIAENYPEAWGDEDRRVADAVKRLKELKARGVDTIVDLTVIGLGRYIPRIARVAAETELNIVVATGLYTYNDVPMYFHYLGPGGELGGPEIMTDMFVRDIEQGIADTGIKAGILKCATDTPGVTPGVERVLRAVAQAHKRTGVPISTHTHAGLRRGLEQQKIFEEEGVDLSRVIIGHSGDSTDIGYLEELIAAGSYLGMDRFGIDAFLPFEDRVNTVAQMCERGHADKMVLSHDANCYFDALPDELVSQVMPNWHYLHIHNDVIPALKERGVTDEQLHTMLVDNPRRIFERQGAYE

SEQ ID NO: 236 - protein, 326 aa, Artificial Sequence
  Synthetic
MSELNTARGSIDTAALGVTLMHEHVFIMTTEIAENYPEAWGDEDRRVADAVKRLNDLKARGVDTIVDLTVIGLGRYIPRIARVAAETELNIVVATGLYTYNDVPMYFHYLGPGGELGGPEIMTDMFVRDIEQGIADTGIKAGILKCATDTPGVTPGVERVLRAVAQAHKRTGVPISTHTHAGLRRGLEQQKIFEEEGVDLSRVIIGHSGDSTDIGYLEELIAAGSYLGMDRFGIDAFLPFEDRVNTVAQMCERGHADKMVLSHDANCYFDALPDELVSQVMPNWHYLHIHNDVIPALKERGVTDEQLHTMLVDNPRRIFERQGAYE

SEQ ID NO: 237 - protein, 326 aa, Artificial Sequence
  Synthetic
MSELNTARGSIDTAALGVTLMHEHVFIMTTEIAENYPEAWGDEDRRVADAVKRLNQLKARGVDTIVDLTVIGLGRYIPRIARVAAETELNIVVATGLYTYNDVPMYFHYLGPGGELGGPEIMTDMFVRDIEQGIADTGIKAGILKCATDTPGVTPGVERVLRAVAQAHKRTGVPISTHTHAGLRRGLEQQKIFEEEGVDLSRVIIGHSGDSTDIGYLEELIAAGSYLGMDRFGIDAFLPFEDRVNTVAQMCERGHADKMVLSHDANCYFDALPDELVSQVMPNWHYLHIHNDVIPALKERGVTDEQLHTMLVDNPRRIFERQGAYE

SEQ ID NO: 238 - protein, 326 aa, Artificial Sequence
  Synthetic
MSELNTARGSIDTAALGVTLMHEHVFIMTTEIAENYPEAWGDEDRRVADAVKRLNRLKARGVDTIVDLTVIGLGRYIPRIARVAAETELNIVVATGLYTYNDVPMYFHYLGPGGELGGPEIMTDMFVRDIEQGIADTGIKAGILKCATDTPGVTPGVERVLRAVAQAHKRTGVPISTHTHAGLRRGLEQQKIFEEEGVDLSRVIIGHSGDSTDIGYLEELIAAGSYLGMDRFGIDAFLPFEDRVNTVAQMCERGHADKMVLSHDANCYFDALPDELVSQVMPNWHYLHIHNDVIPALKERGVTDEQLHTMLVDNPRRIFERQGAYE

SEQ ID NO: 239 - protein, 326 aa, Artificial Sequence
  Synthetic
MSELNTARGSIDTAALGVTLMHEHVFIMTTEIAENYPEAWGDEDRRVADAVKRLNEFKARGVDTIVDLTVIGLGRYIPRIARVAAETELNIVVATGLYTYNDVPMYFHYLGPGGELGGPEIMTDMFVRDIEQGIADTGIKAGILKCATDTPGVTPGVERVLRAVAQAHKRTGVPISTHTHAGLRRGLEQQKIFEEEGVDLSRVIIGHSGDSTDIGYLEELIAAGSYLGMDRFGIDAFLPFEDRVNTVAQMCERGHADKMVLSHDANCYFDALPDELVSQVMPNWHYLHIHNDVIPALKERGVTDEQLHTMLVDNPRRIFERQGAYE

SEQ ID NO: 240 - protein, 326 aa, Artificial Sequence
  Synthetic
MSELNTARGSIDTAALGVTLMHEHVFIMTTEIAENYPEAWGDEDRRVADAVKRLNEYKARGVDTIVDLTVIGLGRYIPRIARVAAETELNIVVATGLYTYNDVPMYFHYLGPGGELGGPEIMTDMFVRDIEQGIADTGIKAGILKCATDTPGVTPGVERVLRAVAQAHKRTGVPISTHTHAGLRRGLEQQKIFEEEGVDLSRVIIGHSGDSTDIGYLEELIAAGSYLGMDRFGIDAFLPFEDRVNTVAQMCERGHADKMVLSHDANCYFDALPDELVSQVMPNWHYLHIHNDVIPALKERGVTDEQLHTMLVDNPRRIFERQGAYE

SEQ ID NO: 241 - protein, 326 aa, Artificial Sequence
  Synthetic
MSELNTARGSIDTAALGVTLMHEHVFIMTTEIAENYPEAWGDEDRRVADAVKRLNELKERGVDTIVDLTVIGLGRYIPRIARVAAETELNIVVATGLYTYNDVPMYFHYLGPGGELGGPEIMTDMFVRDIEQGIADTGIKAGILKCATDTPGVTPGVERVLRAVAQAHKRTGVPISTHTHAGLRRGLEQQKIFEEEGVDLSRVIIGHSGDSTDIGYLEELIAAGSYLGMDRFGIDAFLPFEDRVNTVAQMCERGHADKMVLSHDANCYFDALPDELVSQVMPNWHYLHIHNDVIPALKERGVTDEQLHTMLVDNPRRIFERQGAYE

SEQ ID NO: 242 - protein, 326 aa, Artificial Sequence
  Synthetic
MSELNTARGSIDTAALGVTLMHEHVFIMTTEIAENYPEAWGDEDRRVADAVKRLNELKQRGVDTIVDLTVIGLGRYIPRIARVAAETELNIVVATGLYTYNDVPMYFHYLGPGGELGGPEIMTDMFVRDIEQGIADTGIKAGILKCATDTPGVTPGVERVLRAVAQAHKRTGVPISTHTHAGLRRGLEQQKIFEEEGVDLSRVIIGHSGDSTDIGYLEELIAAGSYLGMDRFGIDAFLPFEDRVNTVAQMCERGHADKMVLSHDANCYFDALPDELVSQVMPNWHYLHIHNDVIPALKERGVTDEQLHTMLVDNPRRIFERQGAYE

SEQ ID NO: 243 - protein, 326 aa, Artificial Sequence
  Synthetic
MSELNTARGSIDTAALGVTLMHEHVFIMTTEIAENYPEAWGDEDRRVADAVKRLNELKAAGVDTIVDLTVIGLGRYIPRIARVAAETELNIVVATGLYTYNDVPMYFHYLGPGGELGGPEIMTDMFVRDIEQGIADTGIKAGILKCATDTPGVTPGVERVLRAVAQAHKRTGVPISTHTHAGLRRGLEQQKIFEEEGVDLSRVIIGHSGDSTDIGYLEELIAAGSYLGMDRFGIDAFLPFEDRVNTVAQMCERGHADKMVLSHDANCYFDALPDELVSQVMPNWHYLHIHNDVIPALKERGVTDEQLHTMLVDNPRRIFERQGAYE

SEQ ID NO: 244 - protein, 326 aa, Artificial Sequence
  Synthetic
MSELNTARGSIDTAALGVTLMHEHVFIMTTEIAENYPEAWGDEDRRVADAVKRLNELKAHGVDTIVDLTVIGLGRYIPRIARVAAETELNIVVATGLYTYNDVPMYFHYLGPGGELGGPEIMTDMFVRDIEQGIADTGIKAGILKCATDTPGVTPGVERVLRAVAQAHKRTGVPISTHTHAGLRRGLEQQKIFEEEGVDLSRVIIGHSGDSTDIGYLEELIAAGSYLGMDRFGIDAFLPFEDRVNTVAQMCERGHADKMVLSHDANCYFDALPDELVSQVMPNWHYLHIHNDVIPALKERGVTDEQLHTMLVDNPRRIFERQGAYE

SEQ ID NO: 245 - protein, 326 aa, Artificial Sequence
  Synthetic
MSELNTARGSIDTAALGVTLMHEHVFIMTTEIAENYPEAWGDEDRRVADAVKRLNELKARGVNTIVDLTVIGLGRYIPRIARVAAETELNIVVATGLYTYNDVPMYFHYLGPGGELGGPEIMTDMFVRDIEQGIADTGIKAGILKCATDTPGVTPGVERVLRAVAQAHKRTGVPISTHTHAGLRRGLEQQKIFEEEGVDLSRVIIGHSGDSTDIGYLEELIAAGSYLGMDRFGIDAFLPFEDRVNTVAQMCERGHADKMVLSHDANCYFDALPDELVSQVMPNWHYLHIHNDVIPALKERGVTDEQLHTMLVDNPRRIFERQGAYE

SEQ ID NO: 246 - protein, 326 aa, Artificial Sequence
  Synthetic
MSELNTARGSIDTAALGVTLMHEHVFIMTTEIAENYPEAWGDEDRRVADAVKRLNELKARGVDSIVDLTVIGLGRYIPRIARVAAETELNIVVATGLYTYNDVPMYFHYLGPGGELGGPEIMTDMFVRDIEQGIADTGIKAGILKCATDTPGVTPGVERVLRAVAQAHKRTGVPISTHTHAGLRRGLEQQKIFEEEGVDLSRVIIGHSGDSTDIGYLEELIAAGSYLGMDRFGIDAFLPFEDRVNTVAQMCERGHADKMVLSHDANCYFDALPDELVSQVMPNWHYLHIHNDVIPALKERGVTDEQLHTMLVDNPRRIFERQGAYE

SEQ ID NO: 247 - protein, 326 aa, Artificial Sequence
  Synthetic
MSELNTARGSIDTAALGVTLMHEHVFIMTTEIAENYPEAWGDEDRRVADAVKRLNELKARGVDTIVDLTVIDLGRYIPRIARVAAETELNIVVATGLYTYNDVPMYFHYLGPGGELGGPEIMTDMFVRDIEQGIADTGIKAGILKCATDTPGVTPGVERVLRAVAQAHKRTGVPISTHTHAGLRRGLEQQKIFEEEGVDLSRVIIGHSGDSTDIGYLEELIAAGSYLGMDRFGIDAFLPFEDRVNTVAQMCERGHADKMVLSHDANCYFDALPDELVSQVMPNWHYLHIHNDVIPALKERGVTDEQLHTMLVDNPRRIFERQGAYE

SEQ ID NO: 248 - protein, 326 aa, Artificial Sequence
  Synthetic
MSELNTARGSIDTAALGVTLMHEHVFIMTTEIAENYPEAWGDEDRRVADAVKRLNELKARGVDTIVDLTVIGLRRYIPRIARVAAETELNIVVATGLYTYNDVPMYFHYLGPGGELGGPEIMTDMFVRDIEQGIADTGIKAGILKCATDTPGVTPGVERVLRAVAQAHKRTGVPISTHTHAGLRRGLEQQKIFEEEGVDLSRVIIGHSGDSTDIGYLEELIAAGSYLGMDRFGIDAFLPFEDRVNTVAQMCERGHADKMVLSHDANCYFDALPDELVSQVMPNWHYLHIHNDVIPALKERGVTDEQLHTMLVDNPRRIFERQGAYE

SEQ ID NO: 249 - protein, 326 aa, Artificial Sequence
  Synthetic
MSELNTARGSIDTAALGVTLMHEHVFIMTTEIAENYPEAWGDEDRRVADAVKRLNELKARGVDTIVDLTVIGLGRDIPRIARVAAETELNIVVATGLYTYNDVPMYFHYLGPGGELGGPEIMTDMFVRDIEQGIADTGIKAGILKCATDTPGVTPGVERVLRAVAQAHKRTGVPISTHTHAGLRRGLEQQKIFEEEGVDLSRVIIGHSGDSTDIGYLEELIAAGSYLGMDRFGIDAFLPFEDRVNTVAQMCERGHADKMVLSHDANCYFDALPDELVSQVMPNWHYLHIHNDVIPALKERGVTDEQLHTMLVDNPRRIFERQGAYE

SEQ ID NO: 250 - protein, 326 aa, Artificial Sequence
  Synthetic
MSELNTARGSIDTAALGVTLMHEHVFIMTTEIAENYPEAWGDEDRRVADAVKRLNELKARGVDTIVDLTVIGLGRNIPRIARVAAETELNIVVATGLYTYNDVPMYFHYLGPGGELGGPEIMTDMFVRDIEQGIADTGIKAGILKCATDTPGVTPGVERVLRAVAQAHKRTGVPISTHTHAGLRRGLEQQKIFEEEGVDLSRVIIGHSGDSTDIGYLEELIAAGSYLGMDRFGIDAFLPFEDRVNTVAQMCERGHADKMVLSHDANCYFDALPDELVSQVMPNWHYLHIHNDVIPALKERGVTDEQLHTMLVDNPRRIFERQGAYE

SEQ ID NO: 251 - protein, 326 aa, Artificial Sequence
  Synthetic
MSELNTARGSIDTAALGVTLMHEHVFIMTTEIAENYPEAWGDEDRRVADAVKRLNELKARGVDTIVDLTVIGLGRYPPRIARVAAETELNIVVATGLYTYNDVPMYFHYLGPGGELGGPEIMTDMFVRDIEQGIADTGIKAGILKCATDTPGVTPGVERVLRAVAQAHKRTGVPISTHTHAGLRRGLEQQKIFEEEGVDLSRVIIGHSGDSTDIGYLEELIAAGSYLGMDRFGIDAFLPFEDRVNTVAQMCERGHADKMVLSHDANCYFDALPDELVSQVMPNWHYLHIHNDVIPALKERGVTDEQLHTMLVDNPRRIFERQGAYE

SEQ ID NO: 252 - protein, 326 aa, Artificial Sequence
  Synthetic
MSELNTARGSIDTAALGVTLMHEHVFIMTTEIAENYPEAWGDEDRRVADAVKRLNELKARGVDTIVDLTVIGLGRYVPRIARVAAETELNIVVATGLYTYNDVPMYFHYLGPGGELGGPEIMTDMFVRDIEQGIADTGIKAGILKCATDTPGVTPGVERVLRAVAQAHKRTGVPISTHTHAGLRRGLEQQKIFEEEGVDLSRVIIGHSGDSTDIGYLEELIAAGSYLGMDRFGIDAFLPFEDRVNTVAQMCERGHADKMVLSHDANCYFDALPDELVSQVMPNWHYLHIHNDVIPALKERGVTDEQLHTMLVDNPRRIFERQGAYE

SEQ ID NO: 253 - protein, 326 aa, Artificial Sequence
  Synthetic
MSELNTARGSIDTAALGVTLMHEHVFIMTTEIAENYPEAWGDEDRRVADAVKRLNELKARGVDTIVDLTVIGLGRYIDRIARVAAETELNIVVATGLYTYNDVPMYFHYLGPGGELGGPEIMTDMFVRDIEQGIADTGIKAGILKCATDTPGVTPGVERVLRAVAQAHKRTGVPISTHTHAGLRRGLEQQKIFEEEGVDLSRVIIGHSGDSTDIGYLEELIAAGSYLGMDRFGIDAFLPFEDRVNTVAQMCERGHADKMVLSHDANCYFDALPDELVSQVMPNWHYLHIHNDVIPALKERGVTDEQLHTMLVDNPRRIFERQGAYE

SEQ ID NO: 254 - protein, 326 aa, Artificial Sequence
  Synthetic
MSELNTARGSIDTAALGVTLMHEHVFIMTTEIAENYPEAWGDEDRRVADAVKRLNELKARGVDTIVDLTVIGLGRYIERIARVAAETELNIVVATGLYTYNDVPMYFHYLGPGGELGGPEIMTDMFVRDIEQGIADTGIKAGILKCATDTPGVTPGVERVLRAVAQAHKRTGVPISTHTHAGLRRGLEQQKIFEEEGVDLSRVIIGHSGDSTDIGYLEELIAAGSYLGMDRFGIDAFLPFEDRVNTVAQMCERGHADKMVLSHDANCYFDALPDELVSQVMPNWHYLHIHNDVIPALKERGVTDEQLHTMLVDNPRRIFERQGAYE

SEQ ID NO: 255 - protein, 326 aa, Artificial Sequence
  Synthetic
MSELNTARGSIDTAALGVTLMHEHVFIMTTEIAENYPEAWGDEDRRVADAVKRLNELKARGVDTIVDLTVIGLGRYIPRLARVAAETELNIVVATGLYTYNDVPMYFHYLGPGGELGGPEIMTDMFVRDIEQGIADTGIKAGILKCATDTPGVTPGVERVLRAVAQAHKRTGVPISTHTHAGLRRGLEQQKIFEEEGVDLSRVIIGHSGDSTDIGYLEELIAAGSYLGMDRFGIDAFLPFEDRVNTVAQMCERGHADKMVLSHDANCYFDALPDELVSQVMPNWHYLHIHNDVIPALKERGVTDEQLHTMLVDNPRRIFERQGAYE

SEQ ID NO: 256 - protein, 326 aa, Artificial Sequence
  Synthetic
MSELNTARGSIDTAALGVTLMHEHVFIMTTEIAENYPEAWGDEDRRVADAVKRLNELKARGVDTIVDLTVIGLGRYIPRMARVAAETELNIVVATGLYTYNDVPMYFHYLGPGGELGGPEIMTDMFVRDIEQGIADTGIKAGILKCATDTPGVTPGVERVLRAVAQAHKRTGVPISTHTHAGLRRGLEQQKIFEEEGVDLSRVIIGHSGDSTDIGYLEELIAAGSYLGMDRFGIDAFLPFEDRVNTVAQMCERGHADKMVLSHDANCYFDALPDELVSQVMPNWHYLHIHNDVIPALKERGVTDEQLHTMLVDNPRRIFERQGAYE

SEQ ID NO: 257 - protein, 326 aa, Artificial Sequence
  Synthetic
MSELNTARGSIDTAALGVTLMHEHVFIMTTEIAENYPEAWGDEDRRVADAVKRLNELKARGVDTIVDLTVIGLGRYIPRVARVAAETELNIVVATGLYTYNDVPMYFHYLGPGGELGGPEIMTDMFVRDIEQGIADTGIKAGILKCATDTPGVTPGVERVLRAVAQAHKRTGVPISTHTHAGLRRGLEQQKIFEEEGVDLSRVIIGHSGDSTDIGYLEELIAAGSYLGMDRFGIDAFLPFEDRVNTVAQMCERGHADKMVLSHDANCYFDALPDELVSQVMPNWHYLHIHNDVIPALKERGVTDEQLHTMLVDNPRRIFERQGAYE

SEQ ID NO: 258 - protein, 326 aa, Artificial Sequence
  Synthetic
MSELNTARGSIDTAALGVTLMHEHVFIMTTEIAENYPEAWGDEDRRVADAVKRLNELKARGVDTIVDLTVIGLGRYIPRIRRVAAETELNIVVATGLYTYNDVPMYFHYLGPGGELGGPEIMTDMFVRDIEQGIADTGIKAGILKCATDTPGVTPGVERVLRAVAQAHKRTGVPISTHTHAGLRRGLEQQKIFEEEGVDLSRVIIGHSGDSTDIGYLEELIAAGSYLGMDRFGIDAFLPFEDRVNTVAQMCERGHADKMVLSHDANCYFDALPDELVSQVMPNWHYLHIHNDVIPALKERGVTDEQLHTMLVDNPRRIFERQGAYE

SEQ ID NO: 259 - protein, 326 aa, Artificial Sequence
  Synthetic
MSELNTARGSIDTAALGVTLMHEHVFIMTTEIAENYPEAWGDEDRRVADAVKRLNELKARGVDTIVDLTVIGLGRYIPRIAEVAAETELNIVVATGLYTYNDVPMYFHYLGPGGELGGPEIMTDMFVRDIEQGIADTGIKAGILKCATDTPGVTPGVERVLRAVAQAHKRTGVPISTHTHAGLRRGLEQQKIFEEEGVDLSRVIIGHSGDSTDIGYLEELIAAGSYLGMDRFGIDAFLPFEDRVNTVAQMCERGHADKMVLSHDANCYFDALPDELVSQVMPNWHYLHIHNDVIPALKERGVTDEQLHTMLVDNPRRIFERQGAYE

SEQ ID NO: 260 - protein, 326 aa, Artificial Sequence
  Synthetic
MSELNTARGSIDTAALGVTLMHEHVFIMTTEIAENYPEAWGDEDRRVADAVKRLNELKARGVDTIVDLTVIGLGRYIPRIAKVAAETELNIVVATGLYTYNDVPMYFHYLGPGGELGGPEIMTDMFVRDIEQGIADTGIKAGILKCATDTPGVTPGVERVLRAVAQAHKRTGVPISTHTHAGLRRGLEQQKIFEEEGVDLSRVIIGHSGDSTDIGYLEELIAAGSYLGMDRFGIDAFLPFEDRVNTVAQMCERGHADKMVLSHDANCYFDALPDELVSQVMPNWHYLHIHNDVIPALKERGVTDEQLHTMLVDNPRRIFERQGAYE

SEQ ID NO: 261 - protein, 326 aa, Artificial Sequence
  Synthetic
MSELNTARGSIDTAALGVTLMHEHVFIMTTEIAENYPEAWGDEDRRVADAVKRLNELKARGVDTIVDLTVIGLGRYIPRIARIAAETELNIVVATGLYTYNDVPMYFHYLGPGGELGGPEIMTDMFVRDIEQGIADTGIKAGILKCATDTPGVTPGVERVLRAVAQAHKRTGVPISTHTHAGLRRGLEQQKIFEEEGVDLSRVIIGHSGDSTDIGYLEELIAAGSYLGMDRFGIDAFLPFEDRVNTVAQMCERGHADKMVLSHDANCYFDALPDELVSQVMPNWHYLHIHNDVIPALKERGVTDEQLHTMLVDNPRRIFERQGAYE

SEQ ID NO: 262 - protein, 326 aa, Artificial Sequence
  Synthetic
MSELNTARGSIDTAALGVTLMHEHVFIMTTEIAENYPEAWGDEDRRVADAVKRLNELKARGVDTIVDLTVIGLGRYIPRIARLAAETELNIVVATGLYTYNDVPMYFHYLGPGGELGGPEIMTDMFVRDIEQGIADTGIKAGILKCATDTPGVTPGVERVLRAVAQAHKRTGVPISTHTHAGLRRGLEQQKIFEEEGVDLSRVIIGHSGDSTDIGYLEELIAAGSYLGMDRFGIDAFLPFEDRVNTVAQMCERGHADKMVLSHDANCYFDALPDELVSQVMPNWHYLHIHNDVIPALKERGVTDEQLHTMLVDNPRRIFERQGAYE

SEQ ID NO: 263 - protein, 326 aa, Artificial Sequence
  Synthetic
MSELNTARGSIDTAALGVTLMHEHVFIMTTEIAENYPEAWGDEDRRVADAVKRLNELKARGVDTIVDLTVIGLGRYIPRIARVSAETELNIVVATGLYTYNDVPMYFHYLGPGGELGGPEIMTDMFVRDIEQGIADTGIKAGILKCATDTPGVTPGVERVLRAVAQAHKRTGVPISTHTHAGLRRGLEQQKIFEEEGVDLSRVIIGHSGDSTDIGYLEELIAAGSYLGMDRFGIDAFLPFEDRVNTVAQMCERGHADKMVLSHDANCYFDALPDELVSQVMPNWHYLHIHNDVIPALKERGVTDEQLHTMLVDNPRRIFERQGAYE

SEQ ID NO: 264 - protein, 326 aa, Artificial Sequence
  Synthetic
MSELNTARGSIDTAALGVTLMHEHVFIMTTEIAENYPEAWGDEDRRVADAVKRLNELKARGVDTIVDLTVIGLGRYIPRIARVAEETELNIVVATGLYTYNDVPMYFHYLGPGGELGGPEIMTDMFVRDIEQGIADTGIKAGILKCATDTPGVTPGVERVLRAVAQAHKRTGVPISTHTHAGLRRGLEQQKIFEEEGVDLSRVIIGHSGDSTDIGYLEELIAAGSYLGMDRFGIDAFLPFEDRVNTVAQMCERGHADKMVLSHDANCYFDALPDELVSQVMPNWHYLHIHNDVIPALKERGVTDEQLHTMLVDNPRRIFERQGAYE

SEQ ID NO: 265 - protein, 326 aa, Artificial Sequence
  Synthetic
MSELNTARGSIDTAALGVTLMHEHVFIMTTEIAENYPEAWGDEDRRVADAVKRLNELKARGVDTIVDLTVIGLGRYIPRIARVARETELNIVVATGLYTYNDVPMYFHYLGPGGELGGPEIMTDMFVRDIEQGIADTGIKAGILKCATDTPGVTPGVERVLRAVAQAHKRTGVPISTHTHAGLRRGLEQQKIFEEEGVDLSRVIIGHSGDSTDIGYLEELIAAGSYLGMDRFGIDAFLPFEDRVNTVAQMCERGHADKMVLSHDANCYFDALPDELVSQVMPNWHYLHIHNDVIPALKERGVTDEQLHTMLVDNPRRIFERQGAYE

SEQ ID NO: 266 - protein, 326 aa, Artificial Sequence
  Synthetic
MSELNTARGSIDTAALGVTLMHEHVFIMTTEIAENYPEAWGDEDRRVADAVKRLNELKARGVDTIVDLTVIGLGRYIPRIARVAARTELNIVVATGLYTYNDVPMYFHYLGPGGELGGPEIMTDMFVRDIEQGIADTGIKAGILKCATDTPGVTPGVERVLRAVAQAHKRTGVPISTHTHAGLRRGLEQQKIFEEEGVDLSRVIIGHSGDSTDIGYLEELIAAGSYLGMDRFGIDAFLPFEDRVNTVAQMCERGHADKMVLSHDANCYFDALPDELVSQVMPNWHYLHIHNDVIPALKERGVTDEQLHTMLVDNPRRIFERQGAYE

SEQ ID NO: 267 - protein, 326 aa, Artificial Sequence
  Synthetic
MSELNTARGSIDTAALGVTLMHEHVFIMTTEIAENYPEAWGDEDRRVADAVKRLNELKARGVDTIVDLTVIGLGRYIPRIARVAAESELNIVVATGLYTYNDVPMYFHYLGPGGELGGPEIMTDMFVRDIEQGIADTGIKAGILKCATDTPGVTPGVERVLRAVAQAHKRTGVPISTHTHAGLRRGLEQQKIFEEEGVDLSRVIIGHSGDSTDIGYLEELIAAGSYLGMDRFGIDAFLPFEDRVNTVAQMCERGHADKMVLSHDANCYFDALPDELVSQVMPNWHYLHIHNDVIPALKERGVTDEQLHTMLVDNPRRIFERQGAYE

SEQ ID NO: 268 - protein, 326 aa, Artificial Sequence
  Synthetic
MSELNTARGSIDTAALGVTLMHEHVFIMTTEIAENYPEAWGDEDRRVADAVKRLNELKARGVDTIVDLTVIGLGRYIPRIARVAAETGLNIVVATGLYTYNDVPMYFHYLGPGGELGGPEIMTDMFVRDIEQGIADTGIKAGILKCATDTPGVTPGVERVLRAVAQAHKRTGVPISTHTHAGLRRGLEQQKIFEEEGVDLSRVIIGHSGDSTDIGYLEELIAAGSYLGMDRFGIDAFLPFEDRVNTVAQMCERGHADKMVLSHDANCYFDALPDELVSQVMPNWHYLHIHNDVIPALKERGVTDEQLHTMLVDNPRRIFERQGAYE

SEQ ID NO: 269 - protein, 326 aa, Artificial Sequence
  Synthetic
MSELNTARGSIDTAALGVTLMHEHVFIMTTEIAENYPEAWGDEDRRVADAVKRLNELKARGVDTIVDLTVIGLGRYIPRIARVAAETEMNIVVATGLYTYNDVPMYFHYLGPGGELGGPEIMTDMFVRDIEQGIADTGIKAGILKCATDTPGVTPGVERVLRAVAQAHKRTGVPISTHTHAGLRRGLEQQKIFEEEGVDLSRVIIGHSGDSTDIGYLEELIAAGSYLGMDRFGIDAFLPFEDRVNTVAQMCERGHADKMVLSHDANCYFDALPDELVSQVMPNWHYLHIHNDVIPALKERGVTDEQLHTMLVDNPRRIFERQGAYE

SEQ ID NO: 270 - protein, 326 aa, Artificial Sequence
  Synthetic
MSELNTARGSIDTAALGVTLMHEHVFIMTTEIAENYPEAWGDEDRRVADAVKRLNELKARGVDTIVDLTVIGLGRYIPRIARVAAETEVNIVVATGLYTYNDVPMYFHYLGPGGELGGPEIMTDMFVRDIEQGIADTGIKAGILKCATDTPGVTPGVERVLRAVAQAHKRTGVPISTHTHAGLRRGLEQQKIFEEEGVDLSRVIIGHSGDSTDIGYLEELIAAGSYLGMDRFGIDAFLPFEDRVNTVAQMCERGHADKMVLSHDANCYFDALPDELVSQVMPNWHYLHIHNDVIPALKERGVTDEQLHTMLVDNPRRIFERQGAYE

SEQ ID NO: 271 - protein, 326 aa, Artificial Sequence
  Synthetic
MSELNTARGSIDTAALGVTLMHEHVFIMTTEIAENYPEAWGDEDRRVADAVKRLNELKARGVDTIVDLTVIGLGRYIPRIARVAAETELHIVVATGLYTYNDVPMYFHYLGPGGELGGPEIMTDMFVRDIEQGIADTGIKAGILKCATDTPGVTPGVERVLRAVAQAHKRTGVPISTHTHAGLRRGLEQQKIFEEEGVDLSRVIIGHSGDSTDIGYLEELIAAGSYLGMDRFGIDAFLPFEDRVNTVAQMCERGHADKMVLSHDANCYFDALPDELVSQVMPNWHYLHIHNDVIPALKERGVTDEQLHTMLVDNPRRIFERQGAYE

SEQ ID NO: 272 - protein, 326 aa, Artificial Sequence
  Synthetic
MSELNTARGSIDTAALGVTLMHEHVFIMTTEIAENYPEAWGDEDRRVADAVKRLNELKARGVDTIVDLTVIGLGRYIPRIARVAAETELNVVVATGLYTYNDVPMYFHYLGPGGELGGPEIMTDMFVRDIEQGIADTGIKAGILKCATDTPGVTPGVERVLRAVAQAHKRTGVPISTHTHAGLRRGLEQQKIFEEEGVDLSRVIIGHSGDSTDIGYLEELIAAGSYLGMDRFGIDAFLPFEDRVNTVAQMCERGHADKMVLSHDANCYFDALPDELVSQVMPNWHYLHIHNDVIPALKERGVTDEQLHTMLVDNPRRIFERQGAYE

SEQ ID NO: 273 - protein, 326 aa, Artificial Sequence
  Synthetic
MSELNTARGSIDTAALGVTLMHEHVFIMTTEIAENYPEAWGDEDRRVADAVKRLNELKARGVDTIVDLTVIGLGRYIPRIARVAAETELNIIVATGLYTYNDVPMYFHYLGPGGELGGPEIMTDMFVRDIEQGIADTGIKAGILKCATDTPGVTPGVERVLRAVAQAHKRTGVPISTHTHAGLRRGLEQQKIFEEEGVDLSRVIIGHSGDSTDIGYLEELIAAGSYLGMDRFGIDAFLPFEDRVNTVAQMCERGHADKMVLSHDANCYFDALPDELVSQVMPNWHYLHIHNDVIPALKERGVTDEQLHTMLVDNPRRIFERQGAYE

SEQ ID NO: 274 - protein, 326 aa, Artificial Sequence
  Synthetic
MSELNTARGSIDTAALGVTLMHEHVFIMTTEIAENYPEAWGDEDRRVADAVKRLNELKARGVDTIVDLTVIGLGRYIPRIARVAAETELNIVCATGLYTYNDVPMYFHYLGPGGELGGPEIMTDMFVRDIEQGIADTGIKAGILKCATDTPGVTPGVERVLRAVAQAHKRTGVPISTHTHAGLRRGLEQQKIFEEEGVDLSRVIIGHSGDSTDIGYLEELIAAGSYLGMDRFGIDAFLPFEDRVNTVAQMCERGHADKMVLSHDANCYFDALPDELVSQVMPNWHYLHIHNDVIPALKERGVTDEQLHTMLVDNPRRIFERQGAYE

SEQ ID NO: 275 - protein, 326 aa, Artificial Sequence
  Synthetic
MSELNTARGSIDTAALGVTLMHEHVFIMTTEIAENYPEAWGDEDRRVADAVKRLNELKARGVDTIVDLTVIGLGRYIPRIARVAAETELNIVVATGLYCYNDVPMYFHYLGPGGELGGPEIMTDMFVRDIEQGIADTGIKAGILKCATDTPGVTPGVERVLRAVAQAHKRTGVPISTHTHAGLRRGLEQQKIFEEEGVDLSRVIIGHSGDSTDIGYLEELIAAGSYLGMDRFGIDAFLPFEDRVNTVAQMCERGHADKMVLSHDANCYFDALPDELVSQVMPNWHYLHIHNDVIPALKERGVTDEQLHTMLVDNPRRIFERQGAYE

SEQ ID NO: 276 - protein, 326 aa, Artificial Sequence
  Synthetic
MSELNTARGSIDTAALGVTLMHEHVFIMTTEIAENYPEAWGDEDRRVADAVKRLNELKARGVDTIVDLTVIGLGRYIPRIARVAAETELNIVVATGLYTYNDHPMYFHYLGPGGELGGPEIMTDMFVRDIEQGIADTGIKAGILKCATDTPGVTPGVERVLRAVAQAHKRTGVPISTHTHAGLRRGLEQQKIFEEEGVDLSRVIIGHSGDSTDIGYLEELIAAGSYLGMDRFGIDAFLPFEDRVNTVAQMCERGHADKMVLSHDANCYFDALPDELVSQVMPNWHYLHIHNDVIPALKERGVTDEQLHTMLVDNPRRIFERQGAYE

SEQ ID NO: 277 - protein, 326 aa, Artificial Sequence
  Synthetic
MSELNTARGSIDTAALGVTLMHEHVFIMTTEIAENYPEAWGDEDRRVADAVKRLNELKARGVDTIVDLTVIGLGRYIPRIARVAAETELNIVVATGLYTYNDWPMYFHYLGPGGELGGPEIMTDMFVRDIEQGIADTGIKAGILKCATDTPGVTPGVERVLRAVAQAHKRTGVPISTHTHAGLRRGLEQQKIFEEEGVDLSRVIIGHSGDSTDIGYLEELIAAGSYLGMDRFGIDAFLPFEDRVNTVAQMCERGHADKMVLSHDANCYFDALPDELVSQVMPNWHYLHIHNDVIPALKERGVTDEQLHTMLVDNPRRIFERQGAYE

SEQ ID NO: 278 - protein, 326 aa, Artificial Sequence
  Synthetic
MSELNTARGSIDTAALGVTLMHEHVFIMTTEIAENYPEAWGDEDRRVADAVKRLNELKARGVDTIVDLTVIGLGRYIPRIARVAAETELNIVVATGLYTYNDYPMYFHYLGPGGELGGPEIMTDMFVRDIEQGIADTGIKAGILKCATDTPGVTPGVERVLRAVAQAHKRTGVPISTHTHAGLRRGLEQQKIFEEEGVDLSRVIIGHSGDSTDIGYLEELIAAGSYLGMDRFGIDAFLPFEDRVNTVAQMCERGHADKMVLSHDANCYFDALPDELVSQVMPNWHYLHIHNDVIPALKERGVTDEQLHTMLVDNPRRIFERQGAYE

SEQ ID NO: 279 - protein, 326 aa, Artificial Sequence
  Synthetic
MSELNTARGSIDTAALGVTLMHEHVFIMTTEIAENYPEAWGDEDRRVADAVKRLNELKARGVDTIVDLTVIGLGRYIPRIARVAAETELNIVVATGLYTYNDVPWYFHYLGPGGELGGPEIMTDMFVRDIEQGIADTGIKAGILKCATDTPGVTPGVERVLRAVAQAHKRTGVPISTHTHAGLRRGLEQQKIFEEEGVDLSRVIIGHSGDSTDIGYLEELIAAGSYLGMDRFGIDAFLPFEDRVNTVAQMCERGHADKMVLSHDANCYFDALPDELVSQVMPNWHYLHIHNDVIPALKERGVTDEQLHTMLVDNPRRIFERQGAYE

SEQ ID NO: 280 - protein, 326 aa, Artificial Sequence
  Synthetic
MSELNTARGSIDTAALGVTLMHEHVFIMTTEIAENYPEAWGDEDRRVADAVKRLNELKARGVDTIVDLTVIGLGRYIPRIARVAAETELNIVVATGLYTYNDVPMFFHYLGPGGELGGPEIMTDMFVRDIEQGIADTGIKAGILKCATDTPGVTPGVERVLRAVAQAHKRTGVPISTHTHAGLRRGLEQQKIFEEEGVDLSRVIIGHSGDSTDIGYLEELIAAGSYLGMDRFGIDAFLPFEDRVNTVAQMCERGHADKMVLSHDANCYFDALPDELVSQVMPNWHYLHIHNDVIPALKERGVTDEQLHTMLVDNPRRIFERQGAYE

SEQ ID NO: 281 - protein, 326 aa, Artificial Sequence
  Synthetic
MSELNTARGSIDTAALGVTLMHEHVFIMTTEIAENYPEAWGDEDRRVADAVKRLNELKARGVDTIVDLTVIGLGRYIPRIARVAAETELNIVVATGLYTYNDVPMHFHYLGPGGELGGPEIMTDMFVRDIEQGIADTGIKAGILKCATDTPGVTPGVERVLRAVAQAHKRTGVPISTHTHAGLRRGLEQQKIFEEEGVDLSRVIIGHSGDSTDIGYLEELIAAGSYLGMDRFGIDAFLPFEDRVNTVAQMCERGHADKMVLSHDANCYFDALPDELVSQVMPNWHYLHIHNDVIPALKERGVTDEQLHTMLVDNPRRIFERQGAYE

SEQ ID NO: 282 - protein, 326 aa, Artificial Sequence
  Synthetic
MSELNTARGSIDTAALGVTLMHEHVFIMTTEIAENYPEAWGDEDRRVADAVKRLNELKARGVDTIVDLTVIGLGRYIPRIARVAAETELNIVVATGLYTYNDVPMWFHYLGPGGELGGPEIMTDMFVRDIEQGIADTGIKAGILKCATDTPGVTPGVERVLRAVAQAHKRTGVPISTHTHAGLRRGLEQQKIFEEEGVDLSRVIIGHSGDSTDIGYLEELIAAGSYLGMDRFGIDAFLPFEDRVNTVAQMCERGHADKMVLSHDANCYFDALPDELVSQVMPNWHYLHIHNDVIPALKERGVTDEQLHTMLVDNPRRIFERQGAYE

SEQ ID NO: 283 - protein, 326 aa, Artificial Sequence
  Synthetic
MSELNTARGSIDTAALGVTLMHEHVFIMTTEIAENYPEAWGDEDRRVADAVKRLNELKARGVDTIVDLTVIGLGRYIPRIARVAAETELNIVVATGLYTYNDVPMYMHYLGPGGELGGPEIMTDMFVRDIEQGIADTGIKAGILKCATDTPGVTPGVERVLRAVAQAHKRTGVPISTHTHAGLRRGLEQQKIFEEEGVDLSRVIIGHSGDSTDIGYLEELIAAGSYLGMDRFGIDAFLPFEDRVNTVAQMCERGHADKMVLSHDANCYFDALPDELVSQVMPNWHYLHIHNDVIPALKERGVTDEQLHTMLVDNPRRIFERQGAYE

SEQ ID NO: 284 - protein, 326 aa, Artificial Sequence
  Synthetic
MSELNTARGSIDTAALGVTLMHEHVFIMTTEIAENYPEAWGDEDRRVADAVKRLNELKARGVDTIVDLTVIGLGRYIPRIARVAAETELNIVVATGLYTYNDVPMYWHYLGPGGELGGPEIMTDMFVRDIEQGIADTGIKAGILKCATDTPGVTPGVERVLRAVAQAHKRTGVPISTHTHAGLRRGLEQQKIFEEEGVDLSRVIIGHSGDSTDIGYLEELIAAGSYLGMDRFGIDAFLPFEDRVNTVAQMCERGHADKMVLSHDANCYFDALPDELVSQVMPNWHYLHIHNDVIPALKERGVTDEQLHTMLVDNPRRIFERQGAYE

SEQ ID NO: 285 - protein, 326 aa, Artificial Sequence
  Synthetic
MSELNTARGSIDTAALGVTLMHEHVFIMTTEIAENYPEAWGDEDRRVADAVKRLNELKARGVDTIVDLTVIGLGRYIPRIARVAAETELNIVVATGLYTYNDVPMYYHYLGPGGELGGPEIMTDMFVRDIEQGIADTGIKAGILKCATDTPGVTPGVERVLRAVAQAHKRTGVPISTHTHAGLRRGLEQQKIFEEEGVDLSRVIIGHSGDSTDIGYLEELIAAGSYLGMDRFGIDAFLPFEDRVNTVAQMCERGHADKMVLSHDANCYFDALPDELVSQVMPNWHYLHIHNDVIPALKERGVTDEQLHTMLVDNPRRIFERQGAYE

SEQ ID NO: 286 - protein, 326 aa, Artificial Sequence
  Synthetic
MSELNTARGSIDTAALGVTLMHEHVFIMTTEIAENYPEAWGDEDRRVADAVKRLNELKARGVDTIVDLTVIGLGRYIPRIARVAAETELNIVVATGLYTYNDVPMYFRYLGPGGELGGPEIMTDMFVRDIEQGIADTGIKAGILKCATDTPGVTPGVERVLRAVAQAHKRTGVPISTHTHAGLRRGLEQQKIFEEEGVDLSRVIIGHSGDSTDIGYLEELIAAGSYLGMDRFGIDAFLPFEDRVNTVAQMCERGHADKMVLSHDANCYFDALPDELVSQVMPNWHYLHIHNDVIPALKERGVTDEQLHTMLVDNPRRIFERQGAYE

SEQ ID NO: 287 - protein, 326 aa, Artificial Sequence
  Synthetic
MSELNTARGSIDTAALGVTLMHEHVFIMTTEIAENYPEAWGDEDRRVADAVKRLNELKARGVDTIVDLTVIGLGRYIPRIARVAAETELNIVVATGLYTYNDVPMYFHFLGPGGELGGPEIMTDMFVRDIEQGIADTGIKAGILKCATDTPGVTPGVERVLRAVAQAHKRTGVPISTHTHAGLRRGLEQQKIFEEEGVDLSRVIIGHSGDSTDIGYLEELIAAGSYLGMDRFGIDAFLPFEDRVNTVAQMCERGHADKMVLSHDANCYFDALPDELVSQVMPNWHYLHIHNDVIPALKERGVTDEQLHTMLVDNPRRIFERQGAYE

SEQ ID NO: 288 - protein, 326 aa, Artificial Sequence
  Synthetic
MSELNTARGSIDTAALGVTLMHEHVFIMTTEIAENYPEAWGDEDRRVADAVKRLNELKARGVDTIVDLTVIGLGRYIPRIARVAAETELNIVVATGLYTYNDVPMYFHWLGPGGELGGPEIMTDMFVRDIEQGIADTGIKAGILKCATDTPGVTPGVERVLRAVAQAHKRTGVPISTHTHAGLRRGLEQQKIFEEEGVDLSRVIIGHSGDSTDIGYLEELIAAGSYLGMDRFGIDAFLPFEDRVNTVAQMCERGHADKMVLSHDANCYFDALPDELVSQVMPNWHYLHIHNDVIPALKERGVTDEQLHTMLVDNPRRIFERQGAYE

SEQ ID NO: 289 - protein, 326 aa, Artificial Sequence
  Synthetic
MSELNTARGSIDTAALGVTLMHEHVFIMTTEIAENYPEAWGDEDRRVADAVKRLNELKARGVDTIVDLTVIGLGRYIPRIARVAAETELNIVVATGLYTYNDVPMYFHYMGPGGELGGPEIMTDMFVRDIEQGIADTGIKAGILKCATDTPGVTPGVERVLRAVAQAHKRTGVPISTHTHAGLRRGLEQQKIFEEEGVDLSRVIIGHSGDSTDIGYLEELIAAGSYLGMDRFGIDAFLPFEDRVNTVAQMCERGHADKMVLSHDANCYFDALPDELVSQVMPNWHYLHIHNDVIPALKERGVTDEQLHTMLVDNPRRIFERQGAYE

SEQ ID NO: 290 - protein, 326 aa, Artificial Sequence
  Synthetic
MSELNTARGSIDTAALGVTLMHEHVFIMTTEIAENYPEAWGDEDRRVADAVKRLNELKARGVDTIVDLTVIGLGRYIPRIARVAAETELNIVVATGLYTYNDVPMYFHYWGPGGELGGPEIMTDMFVRDIEQGIADTGIKAGILKCATDTPGVTPGVERVLRAVAQAHKRTGVPISTHTHAGLRRGLEQQKIFEEEGVDLSRVIIGHSGDSTDIGYLEELIAAGSYLGMDRFGIDAFLPFEDRVNTVAQMCERGHADKMVLSHDANCYFDALPDELVSQVMPNWHYLHIHNDVIPALKERGVTDEQLHTMLVDNPRRIFERQGAYE

SEQ ID NO: 291 - protein, 326 aa, Artificial Sequence
  Synthetic
MSELNTARGSIDTAALGVTLMHEHVFIMTTEIAENYPEAWGDEDRRVADAVKRLNELKARGVDTIVDLTVIGLGRYIPRIARVAAETELNIVVATGLYTYNDVPMYFHYLGPGGDLGGPEIMTDMFVRDIEQGIADTGIKAGILKCATDTPGVTPGVERVLRAVAQAHKRTGVPISTHTHAGLRRGLEQQKIFEEEGVDLSRVIIGHSGDSTDIGYLEELIAAGSYLGMDRFGIDAFLPFEDRVNTVAQMCERGHADKMVLSHDANCYFDALPDELVSQVMPNWHYLHIHNDVIPALKERGVTDEQLHTMLVDNPRRIFERQGAYE

SEQ ID NO: 292 - protein, 326 aa, Artificial Sequence
  Synthetic
MSELNTARGSIDTAALGVTLMHEHVFIMTTEIAENYPEAWGDEDRRVADAVKRLNELKARGVDTIVDLTVIGLGRYIPRIARVAAETELNIVVATGLYTYNDVPMYFHYLGPGGELGSPEIMTDMFVRDIEQGIADTGIKAGILKCATDTPGVTPGVERVLRAVAQAHKRTGVPISTHTHAGLRRGLEQQKIFEEEGVDLSRVIIGHSGDSTDIGYLEELIAAGSYLGMDRFGIDAFLPFEDRVNTVAQMCERGHADKMVLSHDANCYFDALPDELVSQVMPNWHYLHIHNDVIPALKERGVTDEQLHTMLVDNPRRIFERQGAYE

SEQ ID NO: 293 - protein, 326 aa, Artificial Sequence
  Synthetic
MSELNTARGSIDTAALGVTLMHEHVFIMTTEIAENYPEAWGDEDRRVADAVKRLNELKARGVDTIVDLTVIGLGRYIPRIARVAAETELNIVVATGLYTYNDVPMYFHYLGPGGELGTPEIMTDMFVRDIEQGIADTGIKAGILKCATDTPGVTPGVERVLRAVAQAHKRTGVPISTHTHAGLRRGLEQQKIFEEEGVDLSRVIIGHSGDSTDIGYLEELIAAGSYLGMDRFGIDAFLPFEDRVNTVAQMCERGHADKMVLSHDANCYFDALPDELVSQVMPNWHYLHIHNDVIPALKERGVTDEQLHTMLVDNPRRIFERQGAYE

SEQ ID NO: 294 - protein, 326 aa, Artificial Sequence
  Synthetic
MSELNTARGSIDTAALGVTLMHEHVFIMTTEIAENYPEAWGDEDRRVADAVKRLNELKARGVDTIVDLTVIGLGRYIPRIARVAAETELNIVVATGLYTYNDVPMYFHYLGPGGELGGPDIMTDMFVRDIEQGIADTGIKAGILKCATDTPGVTPGVERVLRAVAQAHKRTGVPISTHTHAGLRRGLEQQKIFEEEGVDLSRVIIGHSGDSTDIGYLEELIAAGSYLGMDRFGIDAFLPFEDRVNTVAQMCERGHADKMVLSHDANCYFDALPDELVSQVMPNWHYLHIHNDVIPALKERGVTDEQLHTMLVDNPRRIFERQGAYE

SEQ ID NO: 295 - protein, 326 aa, Artificial Sequence
  Synthetic
MSELNTARGSIDTAALGVTLMHEHVFIMTTEIAENYPEAWGDEDRRVADAVKRLNELKARGVDTIVDLTVIGLGRYIPRIARVAAETELNIVVATGLYTYNDVPMYFHYLGPGGELGGPEEMTDMFVRDIEQGIADTGIKAGILKCATDTPGVTPGVERVLRAVAQAHKRTGVPISTHTHAGLRRGLEQQKIFEEEGVDLSRVIIGHSGDSTDIGYLEELIAAGSYLGMDRFGIDAFLPFEDRVNTVAQMCERGHADKMVLSHDANCYFDALPDELVSQVMPNWHYLHIHNDVIPALKERGVTDEQLHTMLVDNPRRIFERQGAYE

SEQ ID NO: 296 - protein, 326 aa, Artificial Sequence
  Synthetic
MSELNTARGSIDTAALGVTLMHEHVFIMTTEIAENYPEAWGDEDRRVADAVKRLNELKARGVDTIVDLTVIGLGRYIPRIARVAAETELNIVVATGLYTYNDVPMYFHYLGPGGELGGPEQMTDMFVRDIEQGIADTGIKAGILKCATDTPGVTPGVERVLRAVAQAHKRTGVPISTHTHAGLRRGLEQQKIFEEEGVDLSRVIIGHSGDSTDIGYLEELIAAGSYLGMDRFGIDAFLPFEDRVNTVAQMCERGHADKMVLSHDANCYFDALPDELVSQVMPNWHYLHIHNDVIPALKERGVTDEQLHTMLVDNPRRIFERQGAYE

SEQ ID NO: 297 - protein, 326 aa, Artificial Sequence
  Synthetic
MSELNTARGSIDTAALGVTLMHEHVFIMTTEIAENYPEAWGDEDRRVADAVKRLNELKARGVDTIVDLTVIGLGRYIPRIARVAAETELNIVVATGLYTYNDVPMYFHYLGPGGELGGPEIITDMFVRDIEQGIADTGIKAGILKCATDTPGVTPGVERVLRAVAQAHKRTGVPISTHTHAGLRRGLEQQKIFEEEGVDLSRVIIGHSGDSTDIGYLEELIAAGSYLGMDRFGIDAFLPFEDRVNTVAQMCERGHADKMVLSHDANCYFDALPDELVSQVMPNWHYLHIHNDVIPALKERGVTDEQLHTMLVDNPRRIFERQGAYE

SEQ ID NO: 298 - protein, 326 aa, Artificial Sequence
  Synthetic
MSELNTARGSIDTAALGVTLMHEHVFIMTTEIAENYPEAWGDEDRRVADAVKRLNELKARGVDTIVDLTVIGLGRYIPRIARVAAETELNIVVATGLYTYNDVPMYFHYLGPGGELGGPEILTDMFVRDIEQGIADTGIKAGILKCATDTPGVTPGVERVLRAVAQAHKRTGVPISTHTHAGLRRGLEQQKIFEEEGVDLSRVIIGHSGDSTDIGYLEELIAAGSYLGMDRFGIDAFLPFEDRVNTVAQMCERGHADKMVLSHDANCYFDALPDELVSQVMPNWHYLHIHNDVIPALKERGVTDEQLHTMLVDNPRRIFERQGAYE

SEQ ID NO: 299 - protein, 326 aa, Artificial Sequence
  Synthetic
MSELNTARGSIDTAALGVTLMHEHVFIMTTEIAENYPEAWGDEDRRVADAVKRLNELKARGVDTIVDLTVIGLGRYIPRIARVAAETELNIVVATGLYTYNDVPMYFHYLGPGGELGGPEIMADMFVRDIEQGIADTGIKAGILKCATDTPGVTPGVERVLRAVAQAHKRTGVPISTHTHAGLRRGLEQQKIFEEEGVDLSRVIIGHSGDSTDIGYLEELIAAGSYLGMDRFGIDAFLPFEDRVNTVAQMCERGHADKMVLSHDANCYFDALPDELVSQVMPNWHYLHIHNDVIPALKERGVTDEQLHTMLVDNPRRIFERQGAYE

SEQ ID NO: 300 - protein, 326 aa, Artificial Sequence
  Synthetic
MSELNTARGSIDTAALGVTLMHEHVFIMTTEIAENYPEAWGDEDRRVADAVKRLNELKARGVDTIVDLTVIGLGRYIPRIARVAAETELNIVVATGLYTYNDVPMYFHYLGPGGELGGPEIMTEMFVRDIEQGIADTGIKAGILKCATDTPGVTPGVERVLRAVAQAHKRTGVPISTHTHAGLRRGLEQQKIFEEEGVDLSRVIIGHSGDSTDIGYLEELIAAGSYLGMDRFGIDAFLPFEDRVNTVAQMCERGHADKMVLSHDANCYFDALPDELVSQVMPNWHYLHIHNDVIPALKERGVTDEQLHTMLVDNPRRIFERQGAYE

SEQ ID NO: 301 - protein, 326 aa, Artificial Sequence
  Synthetic
MSELNTARGSIDTAALGVTLMHEHVFIMTTEIAENYPEAWGDEDRRVADAVKRLNELKARGVDTIVDLTVIGLGRYIPRIARVAAETELNIVVATGLYTYNDVPMYFHYLGPGGELGGPEIMTDMFIRDIEQGIADTGIKAGILKCATDTPGVTPGVERVLRAVAQAHKRTGVPISTHTHAGLRRGLEQQKIFEEEGVDLSRVIIGHSGDSTDIGYLEELIAAGSYLGMDRFGIDAFLPFEDRVNTVAQMCERGHADKMVLSHDANCYFDALPDELVSQVMPNWHYLHIHNDVIPALKERGVTDEQLHTMLVDNPRRIFERQGAYE

SEQ ID NO: 302 - protein, 326 aa, Artificial Sequence
  Synthetic
MSELNTARGSIDTAALGVTLMHEHVFIMTTEIAENYPEAWGDEDRRVADAVKRLNELKARGVDTIVDLTVIGLGRYIPRIARVAAETELNIVVATGLYTYNDVPMYFHYLGPGGELGGPEIMTDMFVHDIEQGIADTGIKAGILKCATDTPGVTPGVERVLRAVAQAHKRTGVPISTHTHAGLRRGLEQQKIFEEEGVDLSRVIIGHSGDSTDIGYLEELIAAGSYLGMDRFGIDAFLPFEDRVNTVAQMCERGHADKMVLSHDANCYFDALPDELVSQVMPNWHYLHIHNDVIPALKERGVTDEQLHTMLVDNPRRIFERQGAYE

SEQ ID NO: 303 - protein, 326 aa, Artificial Sequence
  Synthetic
MSELNTARGSIDTAALGVTLMHEHVFIMTTEIAENYPEAWGDEDRRVADAVKRLNELKARGVDTIVDLTVIGLGRYIPRIARVAAETELNIVVATGLYTYNDVPMYFHYLGPGGELGGPEIMTDMFVNDIEQGIADTGIKAGILKCATDTPGVTPGVERVLRAVAQAHKRTGVPISTHTHAGLRRGLEQQKIFEEEGVDLSRVIIGHSGDSTDIGYLEELIAAGSYLGMDRFGIDAFLPFEDRVNTVAQMCERGHADKMVLSHDANCYFDALPDELVSQVMPNWHYLHIHNDVIPALKERGVTDEQLHTMLVDNPRRIFERQGAYE

SEQ ID NO: 304 - protein, 326 aa, Artificial Sequence
  Synthetic
MSELNTARGSIDTAALGVTLMHEHVFIMTTEIAENYPEAWGDEDRRVADAVKRLNELKARGVDTIVDLTVIGLGRYIPRIARVAAETELNIVVATGLYTYNDVPMYFHYLGPGGELGGPEIMTDMFVRDIEDGIADTGIKAGILKCATDTPGVTPGVERVLRAVAQAHKRTGVPISTHTHAGLRRGLEQQKIFEEEGVDLSRVIIGHSGDSTDIGYLEELIAAGSYLGMDRFGIDAFLPFEDRVNTVAQMCERGHADKMVLSHDANCYFDALPDELVSQVMPNWHYLHIHNDVIPALKERGVTDEQLHTMLVDNPRRIFERQGAYE

SEQ ID NO: 305 - protein, 326 aa, Artificial Sequence
  Synthetic
MSELNTARGSIDTAALGVTLMHEHVFIMTTEIAENYPEAWGDEDRRVADAVKRLNELKARGVDTIVDLTVIGLGRYIPRIARVAAETELNIVVATGLYTYNDVPMYFHYLGPGGELGGPEIMTDMFVRDIEEGIADTGIKAGILKCATDTPGVTPGVERVLRAVAQAHKRTGVPISTHTHAGLRRGLEQQKIFEEEGVDLSRVIIGHSGDSTDIGYLEELIAAGSYLGMDRFGIDAFLPFEDRVNTVAQMCERGHADKMVLSHDANCYFDALPDELVSQVMPNWHYLHIHNDVIPALKERGVTDEQLHTMLVDNPRRIFERQGAYE

SEQ ID NO: 306 - protein, 326 aa, Artificial Sequence
  Synthetic
MSELNTARGSIDTAALGVTLMHEHVFIMTTEIAENYPEAWGDEDRRVADAVKRLNELKARGVDTIVDLTVIGLGRYIPRIARVAAETELNIVVATGLYTYNDVPMYFHYLGPGGELGGPEIMTDMFVRDIEQGVADTGIKAGILKCATDTPGVTPGVERVLRAVAQAHKRTGVPISTHTHAGLRRGLEQQKIFEEEGVDLSRVIIGHSGDSTDIGYLEELIAAGSYLGMDRFGIDAFLPFEDRVNTVAQMCERGHADKMVLSHDANCYFDALPDELVSQVMPNWHYLHIHNDVIPALKERGVTDEQLHTMLVDNPRRIFERQGAYE

SEQ ID NO: 307 - protein, 326 aa, Artificial Sequence
  Synthetic
MSELNTARGSIDTAALGVTLMHEHVFIMTTEIAENYPEAWGDEDRRVADAVKRLNELKARGVDTIVDLTVIGLGRYIPRIARVAAETELNIVVATGLYTYNDVPMYFHYLGPGGELGGPEIMTDMFVRDIEQGIEDTGIKAGILKCATDTPGVTPGVERVLRAVAQAHKRTGVPISTHTHAGLRRGLEQQKIFEEEGVDLSRVIIGHSGDSTDIGYLEELIAAGSYLGMDRFGIDAFLPFEDRVNTVAQMCERGHADKMVLSHDANCYFDALPDELVSQVMPNWHYLHIHNDVIPALKERGVTDEQLHTMLVDNPRRIFERQGAYE

SEQ ID NO: 308 - protein, 326 aa, Artificial Sequence
  Synthetic
MSELNTARGSIDTAALGVTLMHEHVFIMTTEIAENYPEAWGDEDRRVADAVKRLNELKARGVDTIVDLTVIGLGRYIPRIARVAAETELNIVVATGLYTYNDVPMYFHYLGPGGELGGPEIMTDMFVRDIEQGIGDTGIKAGILKCATDTPGVTPGVERVLRAVAQAHKRTGVPISTHTHAGLRRGLEQQKIFEEEGVDLSRVIIGHSGDSTDIGYLEELIAAGSYLGMDRFGIDAFLPFEDRVNTVAQMCERGHADKMVLSHDANCYFDALPDELVSQVMPNWHYLHIHNDVIPALKERGVTDEQLHTMLVDNPRRIFERQGAYE

SEQ ID NO: 309 - protein, 326 aa, Artificial Sequence
  Synthetic
MSELNTARGSIDTAALGVTLMHEHVFIMTTEIAENYPEAWGDEDRRVADAVKRLNELKARGVDTIVDLTVIGLGRYIPRIARVAAETELNIVVATGLYTYNDVPMYFHYLGPGGELGGPEIMTDMFVRDIEQGIAGTGIKAGILKCATDTPGVTPGVERVLRAVAQAHKRTGVPISTHTHAGLRRGLEQQKIFEEEGVDLSRVIIGHSGDSTDIGYLEELIAAGSYLGMDRFGIDAFLPFEDRVNTVAQMCERGHADKMVLSHDANCYFDALPDELVSQVMPNWHYLHIHNDVIPALKERGVTDEQLHTMLVDNPRRIFERQGAYE

SEQ ID NO: 310 - protein, 326 aa, Artificial Sequence
  Synthetic
MSELNTARGSIDTAALGVTLMHEHVFIMTTEIAENYPEAWGDEDRRVADAVKRLNELKARGVDTIVDLTVIGLGRYIPRIARVAAETELNIVVATGLYTYNDVPMYFHYLGPGGELGGPEIMTDMFVRDIEQGIADTGVKAGILKCATDTPGVTPGVERVLRAVAQAHKRTGVPISTHTHAGLRRGLEQQKIFEEEGVDLSRVIIGHSGDSTDIGYLEELIAAGSYLGMDRFGIDAFLPFEDRVNTVAQMCERGHADKMVLSHDANCYFDALPDELVSQVMPNWHYLHIHNDVIPALKERGVTDEQLHTMLVDNPRRIFERQGAYE

SEQ ID NO: 311 - protein, 326 aa, Artificial Sequence
  Synthetic
MSELNTARGSIDTAALGVTLMHEHVFIMTTEIAENYPEAWGDEDRRVADAVKRLNELKARGVDTIVDLTVIGLGRYIPRIARVAAETELNIVVATGLYTYNDVPMYFHYLGPGGELGGPEIMTDMFVRDIEQGIADTGIHAGILKCATDTPGVTPGVERVLRAVAQAHKRTGVPISTHTHAGLRRGLEQQKIFEEEGVDLSRVIIGHSGDSTDIGYLEELIAAGSYLGMDRFGIDAFLPFEDRVNTVAQMCERGHADKMVLSHDANCYFDALPDELVSQVMPNWHYLHIHNDVIPALKERGVTDEQLHTMLVDNPRRIFERQGAYE

SEQ ID NO: 312 - protein, 326 aa, Artificial Sequence
  Synthetic
MSELNTARGSIDTAALGVTLMHEHVFIMTTEIAENYPEAWGDEDRRVADAVKRLNELKARGVDTIVDLTVIGLGRYIPRIARVAAETELNIVVATGLYTYNDVPMYFHYLGPGGELGGPEIMTDMFVRDIEQGIADTGIRAGILKCATDTPGVTPGVERVLRAVAQAHKRTGVPISTHTHAGLRRGLEQQKIFEEEGVDLSRVIIGHSGDSTDIGYLEELIAAGSYLGMDRFGIDAFLPFEDRVNTVAQMCERGHADKMVLSHDANCYFDALPDELVSQVMPNWHYLHIHNDVIPALKERGVTDEQLHTMLVDNPRRIFERQGAYE

SEQ ID NO: 313 - protein, 326 aa, Artificial Sequence
  Synthetic
MSELNTARGSIDTAALGVTLMHEHVFIMTTEIAENYPEAWGDEDRRVADAVKRLNELKARGVDTIVDLTVIGLGRYIPRIARVAAETELNIVVATGLYTYNDVPMYFHYLGPGGELGGPEIMTDMFVRDIEQGIADTGIKAGILKCATDHPGVTPGVERVLRAVAQAHKRTGVPISTHTHAGLRRGLEQQKIFEEEGVDLSRVIIGHSGDSTDIGYLEELIAAGSYLGMDRFGIDAFLPFEDRVNTVAQMCERGHADKMVLSHDANCYFDALPDELVSQVMPNWHYLHIHNDVIPALKERGVTDEQLHTMLVDNPRRIFERQGAYE

SEQ ID NO: 314 - protein, 326 aa, Artificial Sequence
  Synthetic
MSELNTARGSIDTAALGVTLMHEHVFIMTTEIAENYPEAWGDEDRRVADAVKRLNELKARGVDTIVDLTVIGLGRYIPRIARVAAETELNIVVATGLYTYNDVPMYFHYLGPGGELGGPEIMTDMFVRDIEQGIADTGIKAGILKCATDSPGVTPGVERVLRAVAQAHKRTGVPISTHTHAGLRRGLEQQKIFEEEGVDLSRVIIGHSGDSTDIGYLEELIAAGSYLGMDRFGIDAFLPFEDRVNTVAQMCERGHADKMVLSHDANCYFDALPDELVSQVMPNWHYLHIHNDVIPALKERGVTDEQLHTMLVDNPRRIFERQGAYE

SEQ ID NO: 315 - protein, 326 aa, Artificial Sequence
  Synthetic
MSELNTARGSIDTAALGVTLMHEHVFIMTTEIAENYPEAWGDEDRRVADAVKRLNELKARGVDTIVDLTVIGLGRYIPRIARVAAETELNIVVATGLYTYNDVPMYFHYLGPGGELGGPEIMTDMFVRDIEQGIADTGIKAGILKCATDYPGVTPGVERVLRAVAQAHKRTGVPISTHTHAGLRRGLEQQKIFEEEGVDLSRVIIGHSGDSTDIGYLEELIAAGSYLGMDRFGIDAFLPFEDRVNTVAQMCERGHADKMVLSHDANCYFDALPDELVSQVMPNWHYLHIHNDVIPALKERGVTDEQLHTMLVDNPRRIFERQGAYE

SEQ ID NO: 316 - protein, 326 aa, Artificial Sequence
  Synthetic
MSELNTARGSIDTAALGVTLMHEHVFIMTTEIAENYPEAWGDEDRRVADAVKRLNELKARGVDTIVDLTVIGLGRYIPRIARVAAETELNIVVATGLYTYNDVPMYFHYLGPGGELGGPEIMTDMFVRDIEQGIADTGIKAGILKCATDTDGVTPGVERVLRAVAQAHKRTGVPISTHTHAGLRRGLEQQKIFEEEGVDLSRVIIGHSGDSTDIGYLEELIAAGSYLGMDRFGIDAFLPFEDRVNTVAQMCERGHADKMVLSHDANCYFDALPDELVSQVMPNWHYLHIHNDVIPALKERGVTDEQLHTMLVDNPRRIFERQGAYE

SEQ ID NO: 317 - protein, 326 aa, Artificial Sequence
  Synthetic
MSELNTARGSIDTAALGVTLMHEHVFIMTTEIAENYPEAWGDEDRRVADAVKRLNELKARGVDTIVDLTVIGLGRYIPRIARVAAETELNIVVATGLYTYNDVPMYFHYLGPGGELGGPEIMTDMFVRDIEQGIADTGIKAGILKCATDTHGVTPGVERVLRAVAQAHKRTGVPISTHTHAGLRRGLEQQKIFEEEGVDLSRVIIGHSGDSTDIGYLEELIAAGSYLGMDRFGIDAFLPFEDRVNTVAQMCERGHADKMVLSHDANCYFDALPDELVSQVMPNWHYLHIHNDVIPALKERGVTDEQLHTMLVDNPRRIFERQGAYE

SEQ ID NO: 318 - protein, 326 aa, Artificial Sequence
  Synthetic
MSELNTARGSIDTAALGVTLMHEHVFIMTTEIAENYPEAWGDEDRRVADAVKRLNELKARGVDTIVDLTVIGLGRYIPRIARVAAETELNIVVATGLYTYNDVPMYFHYLGPGGELGGPEIMTDMFVRDIEQGIADTGIKAGILKCATDTNGVTPGVERVLRAVAQAHKRTGVPISTHTHAGLRRGLEQQKIFEEEGVDLSRVIIGHSGDSTDIGYLEELIAAGSYLGMDRFGIDAFLPFEDRVNTVAQMCERGHADKMVLSHDANCYFDALPDELVSQVMPNWHYLHIHNDVIPALKERGVTDEQLHTMLVDNPRRIFERQGAYE

SEQ ID NO: 319 - protein, 326 aa, Artificial Sequence
  Synthetic
MSELNTARGSIDTAALGVTLMHEHVFIMTTEIAENYPEAWGDEDRRVADAVKRLNELKARGVDTIVDLTVIGLGRYIPRIARVAAETELNIVVATGLYTYNDVPMYFHYLGPGGELGGPEIMTDMFVRDIEQGIADTGIKAGILKCATDTWGVTPGVERVLRAVAQAHKRTGVPISTHTHAGLRRGLEQQKIFEEEGVDLSRVIIGHSGDSTDIGYLEELIAAGSYLGMDRFGIDAFLPFEDRVNTVAQMCERGHADKMVLSHDANCYFDALPDELVSQVMPNWHYLHIHNDVIPALKERGVTDEQLHTMLVDNPRRIFERQGAYE

SEQ ID NO: 320 - protein, 326 aa, Artificial Sequence
  Synthetic
MSELNTARGSIDTAALGVTLMHEHVFIMTTEIAENYPEAWGDEDRRVADAVKRLNELKARGVDTIVDLTVIGLGRYIPRIARVAAETELNIVVATGLYTYNDVPMYFHYLGPGGELGGPEIMTDMFVRDIEQGIADTGIKAGILKCATDTPGITPGVERVLRAVAQAHKRTGVPISTHTHAGLRRGLEQQKIFEEEGVDLSRVIIGHSGDSTDIGYLEELIAAGSYLGMDRFGIDAFLPFEDRVNTVAQMCERGHADKMVLSHDANCYFDALPDELVSQVMPNWHYLHIHNDVIPALKERGVTDEQLHTMLVDNPRRIFERQGAYE

SEQ ID NO: 321 - protein, 326 aa, Artificial Sequence
  Synthetic
MSELNTARGSIDTAALGVTLMHEHVFIMTTEIAENYPEAWGDEDRRVADAVKRLNELKARGVDTIVDLTVIGLGRYIPRIARVAAETELNIVVATGLYTYNDVPMYFHYLGPGGELGGPEIMTDMFVRDIEQGIADTGIKAGILKCATDTPGWTPGVERVLRAVAQAHKRTGVPISTHTHAGLRRGLEQQKIFEEEGVDLSRVIIGHSGDSTDIGYLEELIAAGSYLGMDRFGIDAFLPFEDRVNTVAQMCERGHADKMVLSHDANCYFDALPDELVSQVMPNWHYLHIHNDVIPALKERGVTDEQLHTMLVDNPRRIFERQGAYE

SEQ ID NO: 322 - protein, 326 aa, Artificial Sequence
  Synthetic
MSELNTARGSIDTAALGVTLMHEHVFIMTTEIAENYPEAWGDEDRRVADAVKRLNELKARGVDTIVDLTVIGLGRYIPRIARVAAETELNIVVATGLYTYNDVPMYFHYLGPGGELGGPEIMTDMFVRDIEQGIADTGIKAGILKCATDTPGVTDGVERVLRAVAQAHKRTGVPISTHTHAGLRRGLEQQKIFEEEGVDLSRVIIGHSGDSTDIGYLEELIAAGSYLGMDRFGIDAFLPFEDRVNTVAQMCERGHADKMVLSHDANCYFDALPDELVSQVMPNWHYLHIHNDVIPALKERGVTDEQLHTMLVDNPRRIFERQGAYE

SEQ ID NO: 323 - protein, 326 aa, Artificial Sequence
  Synthetic
MSELNTARGSIDTAALGVTLMHEHVFIMTTEIAENYPEAWGDEDRRVADAVKRLNELKARGVDTIVDLTVIGLGRYIPRIARVAAETELNIVVATGLYTYNDVPMYFHYLGPGGELGGPEIMTDMFVRDIEQGIADTGIKAGILKCATDTPGVTEGVERVLRAVAQAHKRTGVPISTHTHAGLRRGLEQQKIFEEEGVDLSRVIIGHSGDSTDIGYLEELIAAGSYLGMDRFGIDAFLPFEDRVNTVAQMCERGHADKMVLSHDANCYFDALPDELVSQVMPNWHYLHIHNDVIPALKERGVTDEQLHTMLVDNPRRIFERQGAYE

SEQ ID NO: 324 - protein, 326 aa, Artificial Sequence
  Synthetic
MSELNTARGSIDTAALGVTLMHEHVFIMTTEIAENYPEAWGDEDRRVADAVKRLNELKARGVDTIVDLTVIGLGRYIPRIARVAAETELNIVVATGLYTYNDVPMYFHYLGPGGELGGPEIMTDMFVRDIEQGIADTGIKAGILKCATDTPGVTPWVERVLRAVAQAHKRTGVPISTHTHAGLRRGLEQQKIFEEEGVDLSRVIIGHSGDSTDIGYLEELIAAGSYLGMDRFGIDAFLPFEDRVNTVAQMCERGHADKMVLSHDANCYFDALPDELVSQVMPNWHYLHIHNDVIPALKERGVTDEQLHTMLVDNPRRIFERQGAYE

SEQ ID NO: 325 - protein, 326 aa, Artificial Sequence
  Synthetic
MSELNTARGSIDTAALGVTLMHEHVFIMTTEIAENYPEAWGDEDRRVADAVKRLNELKARGVDTIVDLTVIGLGRYIPRIARVAAETELNIVVATGLYTYNDVPMYFHYLGPGGELGGPEIMTDMFVRDIEQGIADTGIKAGILKCATDTPGVTPGEERVLRAVAQAHKRTGVPISTHTHAGLRRGLEQQKIFEEEGVDLSRVIIGHSGDSTDIGYLEELIAAGSYLGMDRFGIDAFLPFEDRVNTVAQMCERGHADKMVLSHDANCYFDALPDELVSQVMPNWHYLHIHNDVIPALKERGVTDEQLHTMLVDNPRRIFERQGAYE

SEQ ID NO: 326 - protein, 326 aa, Artificial Sequence
  Synthetic
MSELNTARGSIDTAALGVTLMHEHVFIMTTEIAENYPEAWGDEDRRVADAVKRLNELKARGVDTIVDLTVIGLGRYIPRIARVAAETELNIVVATGLYTYNDVPMYFHYLGPGGELGGPEIMTDMFVRDIEQGIADTGIKAGILKCATDTPGVTPGVHRVLRAVAQAHKRTGVPISTHTHAGLRRGLEQQKIFEEEGVDLSRVIIGHSGDSTDIGYLEELIAAGSYLGMDRFGIDAFLPFEDRVNTVAQMCERGHADKMVLSHDANCYFDALPDELVSQVMPNWHYLHIHNDVIPALKERGVTDEQLHTMLVDNPRRIFERQGAYE

SEQ ID NO: 327 - protein, 326 aa, Artificial Sequence
  Synthetic
MSELNTARGSIDTAALGVTLMHEHVFIMTTEIAENYPEAWGDEDRRVADAVKRLNELKARGVDTIVDLTVIGLGRYIPRIARVAAETELNIVVATGLYTYNDVPMYFHYLGPGGELGGPEIMTDMFVRDIEQGIADTGIKAGILKCATDTPGVTPGVERVLRAVCQAHKRTGVPISTHTHAGLRRGLEQQKIFEEEGVDLSRVIIGHSGDSTDIGYLEELIAAGSYLGMDRFGIDAFLPFEDRVNTVAQMCERGHADKMVLSHDANCYFDALPDELVSQVMPNWHYLHIHNDVIPALKERGVTDEQLHTMLVDNPRRIFERQGAYE

SEQ ID NO: 328 - protein, 326 aa, Artificial Sequence
  Synthetic
MSELNTARGSIDTAALGVTLMHEHVFIMTTEIAENYPEAWGDEDRRVADAVKRLNELKARGVDTIVDLTVIGLGRYIPRIARVAAETELNIVVATGLYTYNDVPMYFHYLGPGGELGGPEIMTDMFVRDIEQGIADTGIKAGILKCATDTPGVTPGVERVLRAVARAHKRTGVPISTHTHAGLRRGLEQQKIFEEEGVDLSRVIIGHSGDSTDIGYLEELIAAGSYLGMDRFGIDAFLPFEDRVNTVAQMCERGHADKMVLSHDANCYFDALPDELVSQVMPNWHYLHIHNDVIPALKERGVTDEQLHTMLVDNPRRIFERQGAYE

SEQ ID NO: 329 - protein, 326 aa, Artificial Sequence
  Synthetic
MSELNTARGSIDTAALGVTLMHEHVFIMTTEIAENYPEAWGDEDRRVADAVKRLNELKARGVDTIVDLTVIGLGRYIPRIARVAAETELNIVVATGLYTYNDVPMYFHYLGPGGELGGPEIMTDMFVRDIEQGIADTGIKAGILKCATDTPGVTPGVERVLRAVAQAQKRTGVPISTHTHAGLRRGLEQQKIFEEEGVDLSRVIIGHSGDSTDIGYLEELIAAGSYLGMDRFGIDAFLPFEDRVNTVAQMCERGHADKMVLSHDANCYFDALPDELVSQVMPNWHYLHIHNDVIPALKERGVTDEQLHTMLVDNPRRIFERQGAYE

SEQ ID NO: 330 - protein, 326 aa, Artificial Sequence
  Synthetic
MSELNTARGSIDTAALGVTLMHEHVFIMTTEIAENYPEAWGDEDRRVADAVKRLNELKARGVDTIVDLTVIGLGRYIPRIARVAAETELNIVVATGLYTYNDVPMYFHYLGPGGELGGPEIMTDMFVRDIEQGIADTGIKAGILKCATDTPGVTPGVERVLRAVAQAHKRTGVPISTHTHADLRRGLEQQKIFEEEGVDLSRVIIGHSGDSTDIGYLEELIAAGSYLGMDRFGIDAFLPFEDRVNTVAQMCERGHADKMVLSHDANCYFDALPDELVSQVMPNWHYLHIHNDVIPALKERGVTDEQLHTMLVDNPRRIFERQGAYE

SEQ ID NO: 331 - protein, 326 aa, Artificial Sequence
  Synthetic
MSELNTARGSIDTAALGVTLMHEHVFIMTTEIAENYPEAWGDEDRRVADAVKRLNELKARGVDTIVDLTVIGLGRYIPRIARVAAETELNIVVATGLYTYNDVPMYFHYLGPGGELGGPEIMTDMFVRDIEQGIADTGIKAGILKCATDTPGVTPGVERVLRAVAQAHKRTGVPISTHTHAGTRRGLEQQKIFEEEGVDLSRVIIGHSGDSTDIGYLEELIAAGSYLGMDRFGIDAFLPFEDRVNTVAQMCERGHADKMVLSHDANCYFDALPDELVSQVMPNWHYLHIHNDVIPALKERGVTDEQLHTMLVDNPRRIFERQGAYE

SEQ ID NO: 332 - protein, 326 aa, Artificial Sequence
  Synthetic
MSELNTARGSIDTAALGVTLMHEHVFIMTTEIAENYPEAWGDEDRRVADAVKRLNELKARGVDTIVDLTVIGLGRYIPRIARVAAETELNIVVATGLYTYNDVPMYFHYLGPGGELGGPEIMTDMFVRDIEQGIADTGIKAGILKCATDTPGVTPGVERVLRAVAQAHKRTGVPISTHTHAGLRRGFEQQKIFEEEGVDLSRVIIGHSGDSTDIGYLEELIAAGSYLGMDRFGIDAFLPFEDRVNTVAQMCERGHADKMVLSHDANCYFDALPDELVSQVMPNWHYLHIHNDVIPALKERGVTDEQLHTMLVDNPRRIFERQGAYE

SEQ ID NO: 333 - protein, 326 aa, Artificial Sequence
  Synthetic
MSELNTARGSIDTAALGVTLMHEHVFIMTTEIAENYPEAWGDEDRRVADAVKRLNELKARGVDTIVDLTVIGLGRYIPRIARVAAETELNIVVATGLYTYNDVPMYFHYLGPGGELGGPEIMTDMFVRDIEQGIADTGIKAGILKCATDTPGVTPGVERVLRAVAQAHKRTGVPISTHTHAGLRRGHEQQKIFEEEGVDLSRVIIGHSGDSTDIGYLEELIAAGSYLGMDRFGIDAFLPFEDRVNTVAQMCERGHADKMVLSHDANCYFDALPDELVSQVMPNWHYLHIHNDVIPALKERGVTDEQLHTMLVDNPRRIFERQGAYE

SEQ ID NO: 334 - protein, 326 aa, Artificial Sequence
  Synthetic
MSELNTARGSIDTAALGVTLMHEHVFIMTTEIAENYPEAWGDEDRRVADAVKRLNELKARGVDTIVDLTVIGLGRYIPRIARVAAETELNIVVATGLYTYNDVPMYFHYLGPGGELGGPEIMTDMFVRDIEQGIADTGIKAGILKCATDTPGVTPGVERVLRAVAQAHKRTGVPISTHTHAGLRRGMEQQKIFEEEGVDLSRVIIGHSGDSTDIGYLEELIAAGSYLGMDRFGIDAFLPFEDRVNTVAQMCERGHADKMVLSHDANCYFDALPDELVSQVMPNWHYLHIHNDVIPALKERGVTDEQLHTMLVDNPRRIFERQGAYE

SEQ ID NO: 335 - protein, 326 aa, Artificial Sequence
  Synthetic
MSELNTARGSIDTAALGVTLMHEHVFIMTTEIAENYPEAWGDEDRRVADAVKRLNELKARGVDTIVDLTVIGLGRYIPRIARVAAETELNIVVATGLYTYNDVPMYFHYLGPGGELGGPEIMTDMFVRDIEQGIADTGIKAGILKCATDTPGVTPGVERVLRAVAQAHKRTGVPISTHTHAGLRRGLCQQKIFEEEGVDLSRVIIGHSGDSTDIGYLEELIAAGSYLGMDRFGIDAFLPFEDRVNTVAQMCERGHADKMVLSHDANCYFDALPDELVSQVMPNWHYLHIHNDVIPALKERGVTDEQLHTMLVDNPRRIFERQGAYE

SEQ ID NO: 336 - protein, 326 aa, Artificial Sequence
  Synthetic
MSELNTARGSIDTAALGVTLMHEHVFIMTTEIAENYPEAWGDEDRRVADAVKRLNELKARGVDTIVDLTVIGLGRYIPRIARVAAETELNIVVATGLYTYNDVPMYFHYLGPGGELGGPEIMTDMFVRDIEQGIADTGIKAGILKCATDTPGVTPGVERVLRAVAQAHKRTGVPISTHTHAGLRRGLWQQKIFEEEGVDLSRVIIGHSGDSTDIGYLEELIAAGSYLGMDRFGIDAFLPFEDRVNTVAQMCERGHADKMVLSHDANCYFDALPDELVSQVMPNWHYLHIHNDVIPALKERGVTDEQLHTMLVDNPRRIFERQGAYE

SEQ ID NO: 337 - protein, 326 aa, Artificial Sequence
  Synthetic
MSELNTARGSIDTAALGVTLMHEHVFIMTTEIAENYPEAWGDEDRRVADAVKRLNELKARGVDTIVDLTVIGLGRYIPRIARVAAETELNIVVATGLYTYNDVPMYFHYLGPGGELGGPEIMTDMFVRDIEQGIADTGIKAGILKCATDTPGVTPGVERVLRAVAQAHKRTGVPISTHTHAGLRRGLEQIKIFEEEGVDLSRVIIGHSGDSTDIGYLEELIAAGSYLGMDRFGIDAFLPFEDRVNTVAQMCERGHADKMVLSHDANCYFDALPDELVSQVMPNWHYLHIHNDVIPALKERGVTDEQLHTMLVDNPRRIFERQGAYE

SEQ ID NO: 338 - protein, 326 aa, Artificial Sequence
  Synthetic
MSELNTARGSIDTAALGVTLMHEHVFIMTTEIAENYPEAWGDEDRRVADAVKRLNELKARGVDTIVDLTVIGLGRYIPRIARVAAETELNIVVATGLYTYNDVPMYFHYLGPGGELGGPEIMTDMFVRDIEQGIADTGIKAGILKCATDTPGVTPGVERVLRAVAQAHKRTGVPISTHTHAGLRRGLEQLKIFEEEGVDLSRVIIGHSGDSTDIGYLEELIAAGSYLGMDRFGIDAFLPFEDRVNTVAQMCERGHADKMVLSHDANCYFDALPDELVSQVMPNWHYLHIHNDVIPALKERGVTDEQLHTMLVDNPRRIFERQGAYE

SEQ ID NO: 339 - protein, 326 aa, Artificial Sequence
  Synthetic
MSELNTARGSIDTAALGVTLMHEHVFIMTTEIAENYPEAWGDEDRRVADAVKRLNELKARGVDTIVDLTVIGLGRYIPRIARVAAETELNIVVATGLYTYNDVPMYFHYLGPGGELGGPEIMTDMFVRDIEQGIADTGIKAGILKCATDTPGVTPGVERVLRAVAQAHKRTGVPISTHTHAGLRRGLEQQRIFEEEGVDLSRVIIGHSGDSTDIGYLEELIAAGSYLGMDRFGIDAFLPFEDRVNTVAQMCERGHADKMVLSHDANCYFDALPDELVSQVMPNWHYLHIHNDVIPALKERGVTDEQLHTMLVDNPRRIFERQGAYE

SEQ ID NO: 340 - protein, 326 aa, Artificial Sequence
  Synthetic
MSELNTARGSIDTAALGVTLMHEHVFIMTTEIAENYPEAWGDEDRRVADAVKRLNELKARGVDTIVDLTVIGLGRYIPRIARVAAETELNIVVATGLYTYNDVPMYFHYLGPGGELGGPEIMTDMFVRDIEQGIADTGIKAGILKCATDTPGVTPGVERVLRAVAQAHKRTGVPISTHTHAGLRRGLEQQKILEEEGVDLSRVIIGHSGDSTDIGYLEELIAAGSYLGMDRFGIDAFLPFEDRVNTVAQMCERGHADKMVLSHDANCYFDALPDELVSQVMPNWHYLHIHNDVIPALKERGVTDEQLHTMLVDNPRRIFERQGAYE

SEQ ID NO: 341 - protein, 326 aa, Artificial Sequence
  Synthetic
MSELNTARGSIDTAALGVTLMHEHVFIMTTEIAENYPEAWGDEDRRVADAVKRLNELKARGVDTIVDLTVIGLGRYIPRIARVAAETELNIVVATGLYTYNDVPMYFHYLGPGGELGGPEIMTDMFVRDIEQGIADTGIKAGILKCATDTPGVTPGVERVLRAVAQAHKRTGVPISTHTHAGLRRGLEQQKIFDEEGVDLSRVIIGHSGDSTDIGYLEELIAAGSYLGMDRFGIDAFLPFEDRVNTVAQMCERGHADKMVLSHDANCYFDALPDELVSQVMPNWHYLHIHNDVIPALKERGVTDEQLHTMLVDNPRRIFERQGAYE

SEQ ID NO: 342 - protein, 326 aa, Artificial Sequence
  Synthetic
MSELNTARGSIDTAALGVTLMHEHVFIMTTEIAENYPEAWGDEDRRVADAVKRLNELKARGVDTIVDLTVIGLGRYIPRIARVAAETELNIVVATGLYTYNDVPMYFHYLGPGGELGGPEIMTDMFVRDIEQGIADTGIKAGILKCATDTPGVTPGVERVLRAVAQAHKRTGVPISTHTHAGLRRGLEQQKIFEDEGVDLSRVIIGHSGDSTDIGYLEELIAAGSYLGMDRFGIDAFLPFEDRVNTVAQMCERGHADKMVLSHDANCYFDALPDELVSQVMPNWHYLHIHNDVIPALKERGVTDEQLHTMLVDNPRRIFERQGAYE

SEQ ID NO: 343 - protein, 326 aa, Artificial Sequence
  Synthetic
MSELNTARGSIDTAALGVTLMHEHVFIMTTEIAENYPEAWGDEDRRVADAVKRLNELKARGVDTIVDLTVIGLGRYIPRIARVAAETELNIVVATGLYTYNDVPMYFHYLGPGGELGGPEIMTDMFVRDIEQGIADTGIKAGILKCATDTPGVTPGVERVLRAVAQAHKRTGVPISTHTHAGLRRGLEQQKIFEEEGVDPSRVIIGHSGDSTDIGYLEELIAAGSYLGMDRFGIDAFLPFEDRVNTVAQMCERGHADKMVLSHDANCYFDALPDELVSQVMPNWHYLHIHNDVIPALKERGVTDEQLHTMLVDNPRRIFERQGAYE

SEQ ID NO: 344 - protein, 326 aa, Artificial Sequence
  Synthetic
MSELNTARGSIDTAALGVTLMHEHVFIMTTEIAENYPEAWGDEDRRVADAVKRLNELKARGVDTIVDLTVIGLGRYIPRIARVAAETELNIVVATGLYTYNDVPMYFHYLGPGGELGGPEIMTDMFVRDIEQGIADTGIKAGILKCATDTPGVTPGVERVLRAVAQAHKRTGVPISTHTHAGLRRGLEQQKIFEEEGVDLNRVIIGHSGDSTDIGYLEELIAAGSYLGMDRFGIDAFLPFEDRVNTVAQMCERGHADKMVLSHDANCYFDALPDELVSQVMPNWHYLHIHNDVIPALKERGVTDEQLHTMLVDNPRRIFERQGAYE

SEQ ID NO: 345 - protein, 326 aa, Artificial Sequence
  Synthetic
MSELNTARGSIDTAALGVTLMHEHVFIMTTEIAENYPEAWGDEDRRVADAVKRLNELKARGVDTIVDLTVIGLGRYIPRIARVAAETELNIVVATGLYTYNDVPMYFHYLGPGGELGGPEIMTDMFVRDIEQGIADTGIKAGILKCATDTPGVTPGVERVLRAVAQAHKRTGVPISTHTHAGLRRGLEQQKIFEEEGVDLSHVIIGHSGDSTDIGYLEELIAAGSYLGMDRFGIDAFLPFEDRVNTVAQMCERGHADKMVLSHDANCYFDALPDELVSQVMPNWHYLHIHNDVIPALKERGVTDEQLHTMLVDNPRRIFERQGAYE

SEQ ID NO: 346 - protein, 326 aa, Artificial Sequence
  Synthetic
MSELNTARGSIDTAALGVTLMHEHVFIMTTEIAENYPEAWGDEDRRVADAVKRLNELKARGVDTIVDLTVIGLGRYIPRIARVAAETELNIVVATGLYTYNDVPMYFHYLGPGGELGGPEIMTDMFVRDIEQGIADTGIKAGILKCATDTPGVTPGVERVLRAVAQAHKRTGVPISTHTHAGLRRGLEQQKIFEEEGVDLSKVIIGHSGDSTDIGYLEELIAAGSYLGMDRFGIDAFLPFEDRVNTVAQMCERGHADKMVLSHDANCYFDALPDELVSQVMPNWHYLHIHNDVIPALKERGVTDEQLHTMLVDNPRRIFERQGAYE

SEQ ID NO: 347 - protein, 326 aa, Artificial Sequence
  Synthetic
MSELNTARGSIDTAALGVTLMHEHVFIMTTEIAENYPEAWGDEDRRVADAVKRLNELKARGVDTIVDLTVIGLGRYIPRIARVAAETELNIVVATGLYTYNDVPMYFHYLGPGGELGGPEIMTDMFVRDIEQGIADTGIKAGILKCATDTPGVTPGVERVLRAVAQAHKRTGVPISTHTHAGLRRGLEQQKIFEEEGVDLSRCIIGHSGDSTDIGYLEELIAAGSYLGMDRFGIDAFLPFEDRVNTVAQMCERGHADKMVLSHDANCYFDALPDELVSQVMPNWHYLHIHNDVIPALKERGVTDEQLHTMLVDNPRRIFERQGAYE

SEQ ID NO: 348 - protein, 326 aa, Artificial Sequence
  Synthetic
MSELNTARGSIDTAALGVTLMHEHVFIMTTEIAENYPEAWGDEDRRVADAVKRLNELKARGVDTIVDLTVIGLGRYIPRIARVAAETELNIVVATGLYTYNDVPMYFHYLGPGGELGGPEIMTDMFVRDIEQGIADTGIKAGILKCATDTPGVTPGVERVLRAVAQAHKRTGVPISTHTHAGLRRGLEQQKIFEEEGVDLSRIIIGHSGDSTDIGYLEELIAAGSYLGMDRFGIDAFLPFEDRVNTVAQMCERGHADKMVLSHDANCYFDALPDELVSQVMPNWHYLHIHNDVIPALKERGVTDEQLHTMLVDNPRRIFERQGAYE

SEQ ID NO: 349 - protein, 326 aa, Artificial Sequence
  Synthetic
MSELNTARGSIDTAALGVTLMHEHVFIMTTEIAENYPEAWGDEDRRVADAVKRLNELKARGVDTIVDLTVIGLGRYIPRIARVAAETELNIVVATGLYTYNDVPMYFHYLGPGGELGGPEIMTDMFVRDIEQGIADTGIKAGILKCATDTPGVTPGVERVLRAVAQAHKRTGVPISTHTHAGLRRGLEQQKIFEEEGVDLSRVIIGHSGDSTDHGYLEELIAAGSYLGMDRFGIDAFLPFEDRVNTVAQMCERGHADKMVLSHDANCYFDALPDELVSQVMPNWHYLHIHNDVIPALKERGVTDEQLHTMLVDNPRRIFERQGAYE

SEQ ID NO: 350 - protein, 326 aa, Artificial Sequence
  Synthetic
MSELNTARGSIDTAALGVTLMHEHVFIMTTEIAENYPEAWGDEDRRVADAVKRLNELKARGVDTIVDLTVIGLGRYIPRIARVAAETELNIVVATGLYTYNDVPMYFHYLGPGGELGGPEIMTDMFVRDIEQGIADTGIKAGILKCATDTPGVTPGVERVLRAVAQAHKRTGVPISTHTHAGLRRGLEQQKIFEEEGVDLSRVIIGHSGDSTDMGYLEELIAAGSYLGMDRFGIDAFLPFEDRVNTVAQMCERGHADKMVLSHDANCYFDALPDELVSQVMPNWHYLHIHNDVIPALKERGVTDEQLHTMLVDNPRRIFERQGAYE

SEQ ID NO: 351 - protein, 326 aa, Artificial Sequence
  Synthetic
MSELNTARGSIDTAALGVTLMHEHVFIMTTEIAENYPEAWGDEDRRVADAVKRLNELKARGVDTIVDLTVIGLGRYIPRIARVAAETELNIVVATGLYTYNDVPMYFHYLGPGGELGGPEIMTDMFVRDIEQGIADTGIKAGILKCATDTPGVTPGVERVLRAVAQAHKRTGVPISTHTHAGLRRGLEQQKIFEEEGVDLSRVIIGHSGDSTDIDYLEELIAAGSYLGMDRFGIDAFLPFEDRVNTVAQMCERGHADKMVLSHDANCYFDALPDELVSQVMPNWHYLHIHNDVIPALKERGVTDEQLHTMLVDNPRRIFERQGAYE

SEQ ID NO: 352 - protein, 326 aa, Artificial Sequence
  Synthetic
MSELNTARGSIDTAALGVTLMHEHVFIMTTEIAENYPEAWGDEDRRVADAVKRLNELKARGVDTIVDLTVIGLGRYIPRIARVAAETELNIVVATGLYTYNDVPMYFHYLGPGGELGGPEIMTDMFVRDIEQGIADTGIKAGILKCATDTPGVTPGVERVLRAVAQAHKRTGVPISTHTHAGLRRGLEQQKIFEEEGVDLSRVIIGHSGDSTDIEYLEELIAAGSYLGMDRFGIDAFLPFEDRVNTVAQMCERGHADKMVLSHDANCYFDALPDELVSQVMPNWHYLHIHNDVIPALKERGVTDEQLHTMLVDNPRRIFERQGAYE

SEQ ID NO: 353 - protein, 326 aa, Artificial Sequence
  Synthetic
MSELNTARGSIDTAALGVTLMHEHVFIMTTEIAENYPEAWGDEDRRVADAVKRLNELKARGVDTIVDLTVIGLGRYIPRIARVAAETELNIVVATGLYTYNDVPMYFHYLGPGGELGGPEIMTDMFVRDIEQGIADTGIKAGILKCATDTPGVTPGVERVLRAVAQAHKRTGVPISTHTHAGLRRGLEQQKIFEEEGVDLSRVIIGHSGDSTDIGYLEDLIAAGSYLGMDRFGIDAFLPFEDRVNTVAQMCERGHADKMVLSHDANCYFDALPDELVSQVMPNWHYLHIHNDVIPALKERGVTDEQLHTMLVDNPRRIFERQGAYE

SEQ ID NO: 354 - protein, 326 aa, Artificial Sequence
  Synthetic
MSELNTARGSIDTAALGVTLMHEHVFIMTTEIAENYPEAWGDEDRRVADAVKRLNELKARGVDTIVDLTVIGLGRYIPRIARVAAETELNIVVATGLYTYNDVPMYFHYLGPGGELGGPEIMTDMFVRDIEQGIADTGIKAGILKCATDTPGVTPGVERVLRAVAQAHKRTGVPISTHTHAGLRRGLEQQKIFEEEGVDLSRVIIGHSGDSTDIGYLEEIIAAGSYLGMDRFGIDAFLPFEDRVNTVAQMCERGHADKMVLSHDANCYFDALPDELVSQVMPNWHYLHIHNDVIPALKERGVTDEQLHTMLVDNPRRIFERQGAYE

SEQ ID NO: 355 - protein, 326 aa, Artificial Sequence
  Synthetic
MSELNTARGSIDTAALGVTLMHEHVFIMTTEIAENYPEAWGDEDRRVADAVKRLNELKARGVDTIVDLTVIGLGRYIPRIARVAAETELNIVVATGLYTYNDVPMYFHYLGPGGELGGPEIMTDMFVRDIEQGIADTGIKAGILKCATDTPGVTPGVERVLRAVAQAHKRTGVPISTHTHAGLRRGLEQQKIFEEEGVDLSRVIIGHSGDSTDIGYLEEMIAAGSYLGMDRFGIDAFLPFEDRVNTVAQMCERGHADKMVLSHDANCYFDALPDELVSQVMPNWHYLHIHNDVIPALKERGVTDEQLHTMLVDNPRRIFERQGAYE

SEQ ID NO: 356 - protein, 326 aa, Artificial Sequence
  Synthetic
MSELNTARGSIDTAALGVTLMHEHVFIMTTEIAENYPEAWGDEDRRVADAVKRLNELKARGVDTIVDLTVIGLGRYIPRIARVAAETELNIVVATGLYTYNDVPMYFHYLGPGGELGGPEIMTDMFVRDIEQGIADTGIKAGILKCATDTPGVTPGVERVLRAVAQAHKRTGVPISTHTHAGLRRGLEQQKIFEEEGVDLSRVIIGHSGDSTDIGYLEEVIAAGSYLGMDRFGIDAFLPFEDRVNTVAQMCERGHADKMVLSHDANCYFDALPDELVSQVMPNWHYLHIHNDVIPALKERGVTDEQLHTMLVDNPRRIFERQGAYE

SEQ ID NO: 357 - protein, 326 aa, Artificial Sequence
  Synthetic
MSELNTARGSIDTAALGVTLMHEHVFIMTTEIAENYPEAWGDEDRRVADAVKRLNELKARGVDTIVDLTVIGLGRYIPRIARVAAETELNIVVATGLYTYNDVPMYFHYLGPGGELGGPEIMTDMFVRDIEQGIADTGIKAGILKCATDTPGVTPGVERVLRAVAQAHKRTGVPISTHTHAGLRRGLEQQKIFEEEGVDLSRVIIGHSGDSTDIGYLEELAAAGSYLGMDRFGIDAFLPFEDRVNTVAQMCERGHADKMVLSHDANCYFDALPDELVSQVMPNWHYLHIHNDVIPALKERGVTDEQLHTMLVDNPRRIFERQGAYE

SEQ ID NO: 358 - protein, 326 aa, Artificial Sequence
  Synthetic
MSELNTARGSIDTAALGVTLMHEHVFIMTTEIAENYPEAWGDEDRRVADAVKRLNELKARGVDTIVDLTVIGLGRYIPRIARVAAETELNIVVATGLYTYNDVPMYFHYLGPGGELGGPEIMTDMFVRDIEQGIADTGIKAGILKCATDTPGVTPGVERVLRAVAQAHKRTGVPISTHTHAGLRRGLEQQKIFEEEGVDLSRVIIGHSGDSTDIGYLEELCAAGSYLGMDRFGIDAFLPFEDRVNTVAQMCERGHADKMVLSHDANCYFDALPDELVSQVMPNWHYLHIHNDVIPALKERGVTDEQLHTMLVDNPRRIFERQGAYE

SEQ ID NO: 359 - protein, 326 aa, Artificial Sequence
  Synthetic
MSELNTARGSIDTAALGVTLMHEHVFIMTTEIAENYPEAWGDEDRRVADAVKRLNELKARGVDTIVDLTVIGLGRYIPRIARVAAETELNIVVATGLYTYNDVPMYFHYLGPGGELGGPEIMTDMFVRDIEQGIADTGIKAGILKCATDTPGVTPGVERVLRAVAQAHKRTGVPISTHTHAGLRRGLEQQKIFEEEGVDLSRVIIGHSGDSTDIGYLEELMAAGSYLGMDRFGIDAFLPFEDRVNTVAQMCERGHADKMVLSHDANCYFDALPDELVSQVMPNWHYLHIHNDVIPALKERGVTDEQLHTMLVDNPRRIFERQGAYE

SEQ ID NO: 360 - protein, 326 aa, Artificial Sequence
  Synthetic
MSELNTARGSIDTAALGVTLMHEHVFIMTTEIAENYPEAWGDEDRRVADAVKRLNELKARGVDTIVDLTVIGLGRYIPRIARVAAETELNIVVATGLYTYNDVPMYFHYLGPGGELGGPEIMTDMFVRDIEQGIADTGIKAGILKCATDTPGVTPGVERVLRAVAQAHKRTGVPISTHTHAGLRRGLEQQKIFEEEGVDLSRVIIGHSGDSTDIGYLEELIHAGSYLGMDRFGIDAFLPFEDRVNTVAQMCERGHADKMVLSHDANCYFDALPDELVSQVMPNWHYLHIHNDVIPALKERGVTDEQLHTMLVDNPRRIFERQGAYE

SEQ ID NO: 361 - protein, 326 aa, Artificial Sequence
  Synthetic
MSELNTARGSIDTAALGVTLMHEHVFIMTTEIAENYPEAWGDEDRRVADAVKRLNELKARGVDTIVDLTVIGLGRYIPRIARVAAETELNIVVATGLYTYNDVPMYFHYLGPGGELGGPEIMTDMFVRDIEQGIADTGIKAGILKCATDTPGVTPGVERVLRAVAQAHKRTGVPISTHTHAGLRRGLEQQKIFEEEGVDLSRVIIGHSGDSTDIGYLEELIARGSYLGMDRFGIDAFLPFEDRVNTVAQMCERGHADKMVLSHDANCYFDALPDELVSQVMPNWHYLHIHNDVIPALKERGVTDEQLHTMLVDNPRRIFERQGAYE

SEQ ID NO: 362 - protein, 326 aa, Artificial Sequence
  Synthetic
MSELNTARGSIDTAALGVTLMHEHVFIMTTEIAENYPEAWGDEDRRVADAVKRLNELKARGVDTIVDLTVIGLGRYIPRIARVAAETELNIVVATGLYTYNDVPMYFHYLGPGGELGGPEIMTDMFVRDIEQGIADTGIKAGILKCATDTPGVTPGVERVLRAVAQAHKRTGVPISTHTHAGLRRGLEQQKIFEEEGVDLSRVIIGHSGDSTDIGYLEELIAAGCYLGMDRFGIDAFLPFEDRVNTVAQMCERGHADKMVLSHDANCYFDALPDELVSQVMPNWHYLHIHNDVIPALKERGVTDEQLHTMLVDNPRRIFERQGAYE

SEQ ID NO: 363 - protein, 326 aa, Artificial Sequence
  Synthetic
MSELNTARGSIDTAALGVTLMHEHVFIMTTEIAENYPEAWGDEDRRVADAVKRLNELKARGVDTIVDLTVIGLGRYIPRIARVAAETELNIVVATGLYTYNDVPMYFHYLGPGGELGGPEIMTDMFVRDIEQGIADTGIKAGILKCATDTPGVTPGVERVLRAVAQAHKRTGVPISTHTHAGLRRGLEQQKIFEEEGVDLSRVIIGHSGDSTDIGYLEELIAAGSWLGMDRFGIDAFLPFEDRVNTVAQMCERGHADKMVLSHDANCYFDALPDELVSQVMPNWHYLHIHNDVIPALKERGVTDEQLHTMLVDNPRRIFERQGAYE

SEQ ID NO: 364 - protein, 326 aa, Artificial Sequence
  Synthetic
MSELNTARGSIDTAALGVTLMHEHVFIMTTEIAENYPEAWGDEDRRVADAVKRLNELKARGVDTIVDLTVIGLGRYIPRIARVAAETELNIVVATGLYTYNDVPMYFHYLGPGGELGGPEIMTDMFVRDIEQGIADTGIKAGILKCATDTPGVTPGVERVLRAVAQAHKRTGVPISTHTHAGLRRGLEQQKIFEEEGVDLSRVIIGHSGDSTDIGYLEELIAAGSYIGMDRFGIDAFLPFEDRVNTVAQMCERGHADKMVLSHDANCYFDALPDELVSQVMPNWHYLHIHNDVIPALKERGVTDEQLHTMLVDNPRRIFERQGAYE

SEQ ID NO: 365 - protein, 326 aa, Artificial Sequence
  Synthetic
MSELNTARGSIDTAALGVTLMHEHVFIMTTEIAENYPEAWGDEDRRVADAVKRLNELKARGVDTIVDLTVIGLGRYIPRIARVAAETELNIVVATGLYTYNDVPMYFHYLGPGGELGGPEIMTDMFVRDIEQGIADTGIKAGILKCATDTPGVTPGVERVLRAVAQAHKRTGVPISTHTHAGLRRGLEQQKIFEEEGVDLSRVIIGHSGDSTDIGYLEELIAAGSYVGMDRFGIDAFLPFEDRVNTVAQMCERGHADKMVLSHDANCYFDALPDELVSQVMPNWHYLHIHNDVIPALKERGVTDEQLHTMLVDNPRRIFERQGAYE

SEQ ID NO: 366 - protein, 326 aa, Artificial Sequence
  Synthetic
MSELNTARGSIDTAALGVTLMHEHVFIMTTEIAENYPEAWGDEDRRVADAVKRLNELKARGVDTIVDLTVIGLGRYIPRIARVAAETELNIVVATGLYTYNDVPMYFHYLGPGGELGGPEIMTDMFVRDIEQGIADTGIKAGILKCATDTPGVTPGVERVLRAVAQAHKRTGVPISTHTHAGLRRGLEQQKIFEEEGVDLSRVIIGHSGDSTDIGYLEELIAAGSYLGMDRFGICAFLPFEDRVNTVAQMCERGHADKMVLSHDANCYFDALPDELVSQVMPNWHYLHIHNDVIPALKERGVTDEQLHTMLVDNPRRIFERQGAYE

SEQ ID NO: 367 - protein, 326 aa, Artificial Sequence
  Synthetic
MSELNTARGSIDTAALGVTLMHEHVFIMTTEIAENYPEAWGDEDRRVADAVKRLNELKARGVDTIVDLTVIGLGRYIPRIARVAAETELNIVVATGLYTYNDVPMYFHYLGPGGELGGPEIMTDMFVRDIEQGIADTGIKAGILKCATDTPGVTPGVERVLRAVAQAHKRTGVPISTHTHAGLRRGLEQQKIFEEEGVDLSRVIIGHSGDSTDIGYLEELIAAGSYLGMDRFGIDHFLPFEDRVNTVAQMCERGHADKMVLSHDANCYFDALPDELVSQVMPNWHYLHIHNDVIPALKERGVTDEQLHTMLVDNPRRIFERQGAYE

SEQ ID NO: 368 - protein, 326 aa, Artificial Sequence
  Synthetic
MSELNTARGSIDTAALGVTLMHEHVFIMTTEIAENYPEAWGDEDRRVADAVKRLNELKARGVDTIVDLTVIGLGRYIPRIARVAAETELNIVVATGLYTYNDVPMYFHYLGPGGELGGPEIMTDMFVRDIEQGIADTGIKAGILKCATDTPGVTPGVERVLRAVAQAHKRTGVPISTHTHAGLRRGLEQQKIFEEEGVDLSRVIIGHSGDSTDIGYLEELIAAGSYLGMDRFGIDKFLPFEDRVNTVAQMCERGHADKMVLSHDANCYFDALPDELVSQVMPNWHYLHIHNDVIPALKERGVTDEQLHTMLVDNPRRIFERQGAYE

SEQ ID NO: 369 - protein, 326 aa, Artificial Sequence
  Synthetic
MSELNTARGSIDTAALGVTLMHEHVFIMTTEIAENYPEAWGDEDRRVADAVKRLNELKARGVDTIVDLTVIGLGRYIPRIARVAAETELNIVVATGLYTYNDVPMYFHYLGPGGELGGPEIMTDMFVRDIEQGIADTGIKAGILKCATDTPGVTPGVERVLRAVAQAHKRTGVPISTHTHAGLRRGLEQQKIFEEEGVDLSRVIIGHSGDSTDIGYLEELIAAGSYLGMDRFGIDWFLPFEDRVNTVAQMCERGHADKMVLSHDANCYFDALPDELVSQVMPNWHYLHIHNDVIPALKERGVTDEQLHTMLVDNPRRIFERQGAYE

SEQ ID NO: 370 - protein, 326 aa, Artificial Sequence
  Synthetic
MSELNTARGSIDTAALGVTLMHEHVFIMTTEIAENYPEAWGDEDRRVADAVKRLNELKARGVDTIVDLTVIGLGRYIPRIARVAAETELNIVVATGLYTYNDVPMYFHYLGPGGELGGPEIMTDMFVRDIEQGIADTGIKAGILKCATDTPGVTPGVERVLRAVAQAHKRTGVPISTHTHAGLRRGLEQQKIFEEEGVDLSRVIIGHSGDSTDIGYLEELIAAGSYLGMDRFGIDAFHPFEDRVNTVAQMCERGHADKMVLSHDANCYFDALPDELVSQVMPNWHYLHIHNDVIPALKERGVTDEQLHTMLVDNPRRIFERQGAYE

SEQ ID NO: 371 - protein, 326 aa, Artificial Sequence
  Synthetic
MSELNTARGSIDTAALGVTLMHEHVFIMTTEIAENYPEAWGDEDRRVADAVKRLNELKARGVDTIVDLTVIGLGRYIPRIARVAAETELNIVVATGLYTYNDVPMYFHYLGPGGELGGPEIMTDMFVRDIEQGIADTGIKAGILKCATDTPGVTPGVERVLRAVAQAHKRTGVPISTHTHAGLRRGLEQQKIFEEEGVDLSRVIIGHSGDSTDIGYLEELIAAGSYLGMDRFGIDAFMPFEDRVNTVAQMCERGHADKMVLSHDANCYFDALPDELVSQVMPNWHYLHIHNDVIPALKERGVTDEQLHTMLVDNPRRIFERQGAYE

SEQ ID NO: 372 - protein, 326 aa, Artificial Sequence
  Synthetic
MSELNTARGSIDTAALGVTLMHEHVFIMTTEIAENYPEAWGDEDRRVADAVKRLNELKARGVDTIVDLTVIGLGRYIPRIARVAAETELNIVVATGLYTYNDVPMYFHYLGPGGELGGPEIMTDMFVRDIEQGIADTGIKAGILKCATDTPGVTPGVERVLRAVAQAHKRTGVPISTHTHAGLRRGLEQQKIFEEEGVDLSRVIIGHSGDSTDIGYLEELIAAGSYLGMDRFGIDAFYPFEDRVNTVAQMCERGHADKMVLSHDANCYFDALPDELVSQVMPNWHYLHIHNDVIPALKERGVTDEQLHTMLVDNPRRIFERQGAYE

SEQ ID NO: 373 - protein, 326 aa, Artificial Sequence
  Synthetic
MSELNTARGSIDTAALGVTLMHEHVFIMTTEIAENYPEAWGDEDRRVADAVKRLNELKARGVDTIVDLTVIGLGRYIPRIARVAAETELNIVVATGLYTYNDVPMYFHYLGPGGELGGPEIMTDMFVRDIEQGIADTGIKAGILKCATDTPGVTPGVERVLRAVAQAHKRTGVPISTHTHAGLRRGLEQQKIFEEEGVDLSRVIIGHSGDSTDIGYLEELIAAGSYLGMDRFGIDAFLSFEDRVNTVAQMCERGHADKMVLSHDANCYFDALPDELVSQVMPNWHYLHIHNDVIPALKERGVTDEQLHTMLVDNPRRIFERQGAYE

SEQ ID NO: 374 - protein, 326 aa, Artificial Sequence
  Synthetic
MSELNTARGSIDTAALGVTLMHEHVFIMTTEIAENYPEAWGDEDRRVADAVKRLNELKARGVDTIVDLTVIGLGRYIPRIARVAAETELNIVVATGLYTYNDVPMYFHYLGPGGELGGPEIMTDMFVRDIEQGIADTGIKAGILKCATDTPGVTPGVERVLRAVAQAHKRTGVPISTHTHAGLRRGLEQQKIFEEEGVDLSRVIIGHSGDSTDIGYLEELIAAGSYLGMDRFGIDAFLPDEDRVNTVAQMCERGHADKMVLSHDANCYFDALPDELVSQVMPNWHYLHIHNDVIPALKERGVTDEQLHTMLVDNPRRIFERQGAYE

SEQ ID NO: 375 - protein, 326 aa, Artificial Sequence
  Synthetic
MSELNTARGSIDTAALGVTLMHEHVFIMTTEIAENYPEAWGDEDRRVADAVKRLNELKARGVDTIVDLTVIGLGRYIPRIARVAAETELNIVVATGLYTYNDVPMYFHYLGPGGELGGPEIMTDMFVRDIEQGIADTGIKAGILKCATDTPGVTPGVERVLRAVAQAHKRTGVPISTHTHAGLRRGLEQQKIFEEEGVDLSRVIIGHSGDSTDIGYLEELIAAGSYLGMDRFGIDAFLPWEDRVNTVAQMCERGHADKMVLSHDANCYFDALPDELVSQVMPNWHYLHIHNDVIPALKERGVTDEQLHTMLVDNPRRIFERQGAYE

SEQ ID NO: 376 - protein, 326 aa, Artificial Sequence
  Synthetic
MSELNTARGSIDTAALGVTLMHEHVFIMTTEIAENYPEAWGDEDRRVADAVKRLNELKARGVDTIVDLTVIGLGRYIPRIARVAAETELNIVVATGLYTYNDVPMYFHYLGPGGELGGPEIMTDMFVRDIEQGIADTGIKAGILKCATDTPGVTPGVERVLRAVAQAHKRTGVPISTHTHAGLRRGLEQQKIFEEEGVDLSRVIIGHSGDSTDIGYLEELIAAGSYLGMDRFGIDAFLPYEDRVNTVAQMCERGHADKMVLSHDANCYFDALPDELVSQVMPNWHYLHIHNDVIPALKERGVTDEQLHTMLVDNPRRIFERQGAYE

SEQ ID NO: 377 - protein, 326 aa, Artificial Sequence
  Synthetic
MSELNTARGSIDTAALGVTLMHEHVFIMTTEIAENYPEAWGDEDRRVADAVKRLNELKARGVDTIVDLTVIGLGRYIPRIARVAAETELNIVVATGLYTYNDVPMYFHYLGPGGELGGPEIMTDMFVRDIEQGIADTGIKAGILKCATDTPGVTPGVERVLRAVAQAHKRTGVPISTHTHAGLRRGLEQQKIFEEEGVDLSRVIIGHSGDSTDIGYLEELIAAGSYLGMDRFGIDAFLPFDDRVNTVAQMCERGHADKMVLSHDANCYFDALPDELVSQVMPNWHYLHIHNDVIPALKERGVTDEQLHTMLVDNPRRIFERQGAYE

SEQ ID NO: 378 - protein, 326 aa, Artificial Sequence
  Synthetic
MSELNTARGSIDTAALGVTLMHEHVFIMTTEIAENYPEAWGDEDRRVADAVKRLNELKARGVDTIVDLTVIGLGRYIPRIARVAAETELNIVVATGLYTYNDVPMYFHYLGPGGELGGPEIMTDMFVRDIEQGIADTGIKAGILKCATDTPGVTPGVERVLRAVAQAHKRTGVPISTHTHAGLRRGLEQQKIFEEEGVDLSRVIIGHSGDSTDIGYLEELIAAGSYLGMDRFGIDAFLPFEERVNTVAQMCERGHADKMVLSHDANCYFDALPDELVSQVMPNWHYLHIHNDVIPALKERGVTDEQLHTMLVDNPRRIFERQGAYE

SEQ ID NO: 379 - protein, 326 aa, Artificial Sequence
  Synthetic
MSELNTARGSIDTAALGVTLMHEHVFIMTTEIAENYPEAWGDEDRRVADAVKRLNELKARGVDTIVDLTVIGLGRYIPRIARVAAETELNIVVATGLYTYNDVPMYFHYLGPGGELGGPEIMTDMFVRDIEQGIADTGIKAGILKCATDTPGVTPGVERVLRAVAQAHKRTGVPISTHTHAGLRRGLEQQKIFEEEGVDLSRVIIGHSGDSTDIGYLEELIAAGSYLGMDRFGIDAFLPFEDRCNTVAQMCERGHADKMVLSHDANCYFDALPDELVSQVMPNWHYLHIHNDVIPALKERGVTDEQLHTMLVDNPRRIFERQGAYE

SEQ ID NO: 380 - protein, 326 aa, Artificial Sequence
  Synthetic
MSELNTARGSIDTAALGVTLMHEHVFIMTTEIAENYPEAWGDEDRRVADAVKRLNELKARGVDTIVDLTVIGLGRYIPRIARVAAETELNIVVATGLYTYNDVPMYFHYLGPGGELGGPEIMTDMFVRDIEQGIADTGIKAGILKCATDTPGVTPGVERVLRAVAQAHKRTGVPISTHTHAGLRRGLEQQKIFEEEGVDLSRVIIGHSGDSTDIGYLEELIAAGSYLGMDRFGIDAFLPFEDRVDTVAQMCERGHADKMVLSHDANCYFDALPDELVSQVMPNWHYLHIHNDVIPALKERGVTDEQLHTMLVDNPRRIFERQGAYE

SEQ ID NO: 381 - protein, 326 aa, Artificial Sequence
  Synthetic
MSELNTARGSIDTAALGVTLMHEHVFIMTTEIAENYPEAWGDEDRRVADAVKRLNELKARGVDTIVDLTVIGLGRYIPRIARVAAETELNIVVATGLYTYNDVPMYFHYLGPGGELGGPEIMTDMFVRDIEQGIADTGIKAGILKCATDTPGVTPGVERVLRAVAQAHKRTGVPISTHTHAGLRRGLEQQKIFEEEGVDLSRVIIGHSGDSTDIGYLEELIAAGSYLGMDRFGIDAFLPFEDRVETVAQMCERGHADKMVLSHDANCYFDALPDELVSQVMPNWHYLHIHNDVIPALKERGVTDEQLHTMLVDNPRRIFERQGAYE

SEQ ID NO: 382 - protein, 326 aa, Artificial Sequence
  Synthetic
MSELNTARGSIDTAALGVTLMHEHVFIMTTEIAENYPEAWGDEDRRVADAVKRLNELKARGVDTIVDLTVIGLGRYIPRIARVAAETELNIVVATGLYTYNDVPMYFHYLGPGGELGGPEIMTDMFVRDIEQGIADTGIKAGILKCATDTPGVTPGVERVLRAVAQAHKRTGVPISTHTHAGLRRGLEQQKIFEEEGVDLSRVIIGHSGDSTDIGYLEELIAAGSYLGMDRFGIDAFLPFEDRVRTVAQMCERGHADKMVLSHDANCYFDALPDELVSQVMPNWHYLHIHNDVIPALKERGVTDEQLHTMLVDNPRRIFERQGAYE

SEQ ID NO: 383 - protein, 326 aa, Artificial Sequence
  Synthetic
MSELNTARGSIDTAALGVTLMHEHVFIMTTEIAENYPEAWGDEDRRVADAVKRLNELKARGVDTIVDLTVIGLGRYIPRIARVAAETELNIVVATGLYTYNDVPMYFHYLGPGGELGGPEIMTDMFVRDIEQGIADTGIKAGILKCATDTPGVTPGVERVLRAVAQAHKRTGVPISTHTHAGLRRGLEQQKIFEEEGVDLSRVIIGHSGDSTDIGYLEELIAAGSYLGMDRFGIDAFLPFEDRVNLVAQMCERGHADKMVLSHDANCYFDALPDELVSQVMPNWHYLHIHNDVIPALKERGVTDEQLHTMLVDNPRRIFERQGAYE

SEQ ID NO: 384 - protein, 326 aa, Artificial Sequence
  Synthetic
MSELNTARGSIDTAALGVTLMHEHVFIMTTEIAENYPEAWGDEDRRVADAVKRLNELKARGVDTIVDLTVIGLGRYIPRIARVAAETELNIVVATGLYTYNDVPMYFHYLGPGGELGGPEIMTDMFVRDIEQGIADTGIKAGILKCATDTPGVTPGVERVLRAVAQAHKRTGVPISTHTHAGLRRGLEQQKIFEEEGVDLSRVIIGHSGDSTDIGYLEELIAAGSYLGMDRFGIDAFLPFEDRVNMVAQMCERGHADKMVLSHDANCYFDALPDELVSQVMPNWHYLHIHNDVIPALKERGVTDEQLHTMLVDNPRRIFERQGAYE

SEQ ID NO: 385 - protein, 326 aa, Artificial Sequence
  Synthetic
MSELNTARGSIDTAALGVTLMHEHVFIMTTEIAENYPEAWGDEDRRVADAVKRLNELKARGVDTIVDLTVIGLGRYIPRIARVAAETELNIVVATGLYTYNDVPMYFHYLGPGGELGGPEIMTDMFVRDIEQGIADTGIKAGILKCATDTPGVTPGVERVLRAVAQAHKRTGVPISTHTHAGLRRGLEQQKIFEEEGVDLSRVIIGHSGDSTDIGYLEELIAAGSYLGMDRFGIDAFLPFEDRVNTIAQMCERGHADKMVLSHDANCYFDALPDELVSQVMPNWHYLHIHNDVIPALKERGVTDEQLHTMLVDNPRRIFERQGAYE

SEQ ID NO: 386 - protein, 326 aa, Artificial Sequence
  Synthetic
MSELNTARGSIDTAALGVTLMHEHVFIMTTEIAENYPEAWGDEDRRVADAVKRLNELKARGVDTIVDLTVIGLGRYIPRIARVAAETELNIVVATGLYTYNDVPMYFHYLGPGGELGGPEIMTDMFVRDIEQGIADTGIKAGILKCATDTPGVTPGVERVLRAVAQAHKRTGVPISTHTHAGLRRGLEQQKIFEEEGVDLSRVIIGHSGDSTDIGYLEELIAAGSYLGMDRFGIDAFLPFEDRVNTLAQMCERGHADKMVLSHDANCYFDALPDELVSQVMPNWHYLHIHNDVIPALKERGVTDEQLHTMLVDNPRRIFERQGAYE

SEQ ID NO: 387 - protein, 326 aa, Artificial Sequence
  Synthetic
MSELNTARGSIDTAALGVTLMHEHVFIMTTEIAENYPEAWGDEDRRVADAVKRLNELKARGVDTIVDLTVIGLGRYIPRIARVAAETELNIVVATGLYTYNDVPMYFHYLGPGGELGGPEIMTDMFVRDIEQGIADTGIKAGILKCATDTPGVTPGVERVLRAVAQAHKRTGVPISTHTHAGLRRGLEQQKIFEEEGVDLSRVIIGHSGDSTDIGYLEELIAAGSYLGMDRFGIDAFLPFEDRVNTVAEMCERGHADKMVLSHDANCYFDALPDELVSQVMPNWHYLHIHNDVIPALKERGVTDEQLHTMLVDNPRRIFERQGAYE

SEQ ID NO: 388 - protein, 326 aa, Artificial Sequence
  Synthetic
MSELNTARGSIDTAALGVTLMHEHVFIMTTEIAENYPEAWGDEDRRVADAVKRLNELKARGVDTIVDLTVIGLGRYIPRIARVAAETELNIVVATGLYTYNDVPMYFHYLGPGGELGGPEIMTDMFVRDIEQGIADTGIKAGILKCATDTPGVTPGVERVLRAVAQAHKRTGVPISTHTHAGLRRGLEQQKIFEEEGVDLSRVIIGHSGDSTDIGYLEELIAAGSYLGMDRFGIDAFLPFEDRVNTVAHMCERGHADKMVLSHDANCYFDALPDELVSQVMPNWHYLHIHNDVIPALKERGVTDEQLHTMLVDNPRRIFERQGAYE

SEQ ID NO: 389 - protein, 326 aa, Artificial Sequence
  Synthetic
MSELNTARGSIDTAALGVTLMHEHVFIMTTEIAENYPEAWGDEDRRVADAVKRLNELKARGVDTIVDLTVIGLGRYIPRIARVAAETELNIVVATGLYTYNDVPMYFHYLGPGGELGGPEIMTDMFVRDIEQGIADTGIKAGILKCATDTPGVTPGVERVLRAVAQAHKRTGVPISTHTHAGLRRGLEQQKIFEEEGVDLSRVIIGHSGDSTDIGYLEELIAAGSYLGMDRFGIDAFLPFEDRVNTVARMCERGHADKMVLSHDANCYFDALPDELVSQVMPNWHYLHIHNDVIPALKERGVTDEQLHTMLVDNPRRIFERQGAYE

SEQ ID NO: 390 - protein, 326 aa, Artificial Sequence
  Synthetic
MSELNTARGSIDTAALGVTLMHEHVFIMTTEIAENYPEAWGDEDRRVADAVKRLNELKARGVDTIVDLTVIGLGRYIPRIARVAAETELNIVVATGLYTYNDVPMYFHYLGPGGELGGPEIMTDMFVRDIEQGIADTGIKAGILKCATDTPGVTPGVERVLRAVAQAHKRTGVPISTHTHAGLRRGLEQQKIFEEEGVDLSRVIIGHSGDSTDIGYLEELIAAGSYLGMDRFGIDAFLPFEDRVNTVAWMCERGHADKMVLSHDANCYFDALPDELVSQVMPNWHYLHIHNDVIPALKERGVTDEQLHTMLVDNPRRIFERQGAYE

SEQ ID NO: 391 - protein, 326 aa, Artificial Sequence
  Synthetic
MSELNTARGSIDTAALGVTLMHEHVFIMTTEIAENYPEAWGDEDRRVADAVKRLNELKARGVDTIVDLTVIGLGRYIPRIARVAAETELNIVVATGLYTYNDVPMYFHYLGPGGELGGPEIMTDMFVRDIEQGIADTGIKAGILKCATDTPGVTPGVERVLRAVAQAHKRTGVPISTHTHAGLRRGLEQQKIFEEEGVDLSRVIIGHSGDSTDIGYLEELIAAGSYLGMDRFGIDAFLPFEDRVNTVAQLCERGHADKMVLSHDANCYFDALPDELVSQVMPNWHYLHIHNDVIPALKERGVTDEQLHTMLVDNPRRIFERQGAYE

SEQ ID NO: 392 - protein, 326 aa, Artificial Sequence
  Synthetic
MSELNTARGSIDTAALGVTLMHEHVFIMTTEIAENYPEAWGDEDRRVADAVKRLNELKARGVDTIVDLTVIGLGRYIPRIARVAAETELNIVVATGLYTYNDVPMYFHYLGPGGELGGPEIMTDMFVRDIEQGIADTGIKAGILKCATDTPGVTPGVERVLRAVAQAHKRTGVPISTHTHAGLRRGLEQQKIFEEEGVDLSRVIIGHSGDSTDIGYLEELIAAGSYLGMDRFGIDAFLPFEDRVNTVAQMIERGHADKMVLSHDANCYFDALPDELVSQVMPNWHYLHIHNDVIPALKERGVTDEQLHTMLVDNPRRIFERQGAYE

SEQ ID NO: 393 - protein, 326 aa, Artificial Sequence
  Synthetic
MSELNTARGSIDTAALGVTLMHEHVFIMTTEIAENYPEAWGDEDRRVADAVKRLNELKARGVDTIVDLTVIGLGRYIPRIARVAAETELNIVVATGLYTYNDVPMYFHYLGPGGELGGPEIMTDMFVRDIEQGIADTGIKAGILKCATDTPGVTPGVERVLRAVAQAHKRTGVPISTHTHAGLRRGLEQQKIFEEEGVDLSRVIIGHSGDSTDIGYLEELIAAGSYLGMDRFGIDAFLPFEDRVNTVAQMVERGHADKMVLSHDANCYFDALPDELVSQVMPNWHYLHIHNDVIPALKERGVTDEQLHTMLVDNPRRIFERQGAYE

SEQ ID NO: 394 - protein, 326 aa, Artificial Sequence
  Synthetic
MSELNTARGSIDTAALGVTLMHEHVFIMTTEIAENYPEAWGDEDRRVADAVKRLNELKARGVDTIVDLTVIGLGRYIPRIARVAAETELNIVVATGLYTYNDVPMYFHYLGPGGELGGPEIMTDMFVRDIEQGIADTGIKAGILKCATDTPGVTPGVERVLRAVAQAHKRTGVPISTHTHAGLRRGLEQQKIFEEEGVDLSRVIIGHSGDSTDIGYLEELIAAGSYLGMDRFGIDAFLPFEDRVNTVAQMCHRGHADKMVLSHDANCYFDALPDELVSQVMPNWHYLHIHNDVIPALKERGVTDEQLHTMLVDNPRRIFERQGAYE

SEQ ID NO: 395 - protein, 326 aa, Artificial Sequence
  Synthetic
MSELNTARGSIDTAALGVTLMHEHVFIMTTEIAENYPEAWGDEDRRVADAVKRLNELKARGVDTIVDLTVIGLGRYIPRIARVAAETELNIVVATGLYTYNDVPMYFHYLGPGGELGGPEIMTDMFVRDIEQGIADTGIKAGILKCATDTPGVTPGVERVLRAVAQAHKRTGVPISTHTHAGLRRGLEQQKIFEEEGVDLSRVIIGHSGDSTDIGYLEELIAAGSYLGMDRFGIDAFLPFEDRVNTVAQMCENGHADKMVLSHDANCYFDALPDELVSQVMPNWHYLHIHNDVIPALKERGVTDEQLHTMLVDNPRRIFERQGAYE

SEQ ID NO: 396 - protein, 326 aa, Artificial Sequence
  Synthetic
MSELNTARGSIDTAALGVTLMHEHVFIMTTEIAENYPEAWGDEDRRVADAVKRLNELKARGVDTIVDLTVIGLGRYIPRIARVAAETELNIVVATGLYTYNDVPMYFHYLGPGGELGGPEIMTDMFVRDIEQGIADTGIKAGILKCATDTPGVTPGVERVLRAVAQAHKRTGVPISTHTHAGLRRGLEQQKIFEEEGVDLSRVIIGHSGDSTDIGYLEELIAAGSYLGMDRFGIDAFLPFEDRVNTVAQMCERGWADKMVLSHDANCYFDALPDELVSQVMPNWHYLHIHNDVIPALKERGVTDEQLHTMLVDNPRRIFERQGAYE

SEQ ID NO: 397 - protein, 326 aa, Artificial Sequence
  Synthetic
MSELNTARGSIDTAALGVTLMHEHVFIMTTEIAENYPEAWGDEDRRVADAVKRLNELKARGVDTIVDLTVIGLGRYIPRIARVAAETELNIVVATGLYTYNDVPMYFHYLGPGGELGGPEIMTDMFVRDIEQGIADTGIKAGILKCATDTPGVTPGVERVLRAVAQAHKRTGVPISTHTHAGLRRGLEQQKIFEEEGVDLSRVIIGHSGDSTDIGYLEELIAAGSYLGMDRFGIDAFLPFEDRVNTVAQMCERGYADKMVLSHDANCYFDALPDELVSQVMPNWHYLHIHNDVIPALKERGVTDEQLHTMLVDNPRRIFERQGAYE

SEQ ID NO: 398 - protein, 326 aa, Artificial Sequence
  Synthetic
MSELNTARGSIDTAALGVTLMHEHVFIMTTEIAENYPEAWGDEDRRVADAVKRLNELKARGVDTIVDLTVIGLGRYIPRIARVAAETELNIVVATGLYTYNDVPMYFHYLGPGGELGGPEIMTDMFVRDIEQGIADTGIKAGILKCATDTPGVTPGVERVLRAVAQAHKRTGVPISTHTHAGLRRGLEQQKIFEEEGVDLSRVIIGHSGDSTDIGYLEELIAAGSYLGMDRFGIDAFLPFEDRVNTVAQMCERGHADHMVLSHDANCYFDALPDELVSQVMPNWHYLHIHNDVIPALKERGVTDEQLHTMLVDNPRRIFERQGAYE

SEQ ID NO: 399 - protein, 326 aa, Artificial Sequence
  Synthetic
MSELNTARGSIDTAALGVTLMHEHVFIMTTEIAENYPEAWGDEDRRVADAVKRLNELKARGVDTIVDLTVIGLGRYIPRIARVAAETELNIVVATGLYTYNDVPMYFHYLGPGGELGGPEIMTDMFVRDIEQGIADTGIKAGILKCATDTPGVTPGVERVLRAVAQAHKRTGVPISTHTHAGLRRGLEQQKIFEEEGVDLSRVIIGHSGDSTDIGYLEELIAAGSYLGMDRFGIDAFLPFEDRVNTVAQMCERGHADRMVLSHDANCYFDALPDELVSQVMPNWHYLHIHNDVIPALKERGVTDEQLHTMLVDNPRRIFERQGAYE

SEQ ID NO: 400 - protein, 326 aa, Artificial Sequence
  Synthetic
MSELNTARGSIDTAALGVTLMHEHVFIMTTEIAENYPEAWGDEDRRVADAVKRLNELKARGVDTIVDLTVIGLGRYIPRIARVAAETELNIVVATGLYTYNDVPMYFHYLGPGGELGGPEIMTDMFVRDIEQGIADTGIKAGILKCATDTPGVTPGVERVLRAVAQAHKRTGVPISTHTHAGLRRGLEQQKIFEEEGVDLSRVIIGHSGDSTDIGYLEELIAAGSYLGMDRFGIDAFLPFEDRVNTVAQMCERGHADKIVLSHDANCYFDALPDELVSQVMPNWHYLHIHNDVIPALKERGVTDEQLHTMLVDNPRRIFERQGAYE

SEQ ID NO: 401 - protein, 326 aa, Artificial Sequence
  Synthetic
MSELNTARGSIDTAALGVTLMHEHVFIMTTEIAENYPEAWGDEDRRVADAVKRLNELKARGVDTIVDLTVIGLGRYIPRIARVAAETELNIVVATGLYTYNDVPMYFHYLGPGGELGGPEIMTDMFVRDIEQGIADTGIKAGILKCATDTPGVTPGVERVLRAVAQAHKRTGVPISTHTHAGLRRGLEQQKIFEEEGVDLSRVIIGHSGDSTDIGYLEELIAAGSYLGMDRFGIDAFLPFEDRVNTVAQMCERGHADKMVLSHDANCYFDGLPDELVSQVMPNWHYLHIHNDVIPALKERGVTDEQLHTMLVDNPRRIFERQGAYE

SEQ ID NO: 402 - protein, 326 aa, Artificial Sequence
  Synthetic
MSELNTARGSIDTAALGVTLMHEHVFIMTTEIAENYPEAWGDEDRRVADAVKRLNELKARGVDTIVDLTVIGLGRYIPRIARVAAETELNIVVATGLYTYNDVPMYFHYLGPGGELGGPEIMTDMFVRDIEQGIADTGIKAGILKCATDTPGVTPGVERVLRAVAQAHKRTGVPISTHTHAGLRRGLEQQKIFEEEGVDLSRVIIGHSGDSTDIGYLEELIAAGSYLGMDRFGIDAFLPFEDRVNTVAQMCERGHADKMVLSHDANCYFDACPDELVSQVMPNWHYLHIHNDVIPALKERGVTDEQLHTMLVDNPRRIFERQGAYE

SEQ ID NO: 403 - protein, 326 aa, Artificial Sequence
  Synthetic
MSELNTARGSIDTAALGVTLMHEHVFIMTTEIAENYPEAWGDEDRRVADAVKRLNELKARGVDTIVDLTVIGLGRYIPRIARVAAETELNIVVATGLYTYNDVPMYFHYLGPGGELGGPEIMTDMFVRDIEQGIADTGIKAGILKCATDTPGVTPGVERVLRAVAQAHKRTGVPISTHTHAGLRRGLEQQKIFEEEGVDLSRVIIGHSGDSTDIGYLEELIAAGSYLGMDRFGIDAFLPFEDRVNTVAQMCERGHADKMVLSHDANCYFDAHPDELVSQVMPNWHYLHIHNDVIPALKERGVTDEQLHTMLVDNPRRIFERQGAYE

SEQ ID NO: 404 - protein, 326 aa, Artificial Sequence
  Synthetic
MSELNTARGSIDTAALGVTLMHEHVFIMTTEIAENYPEAWGDEDRRVADAVKRLNELKARGVDTIVDLTVIGLGRYIPRIARVAAETELNIVVATGLYTYNDVPMYFHYLGPGGELGGPEIMTDMFVRDIEQGIADTGIKAGILKCATDTPGVTPGVERVLRAVAQAHKRTGVPISTHTHAGLRRGLEQQKIFEEEGVDLSRVIIGHSGDSTDIGYLEELIAAGSYLGMDRFGIDAFLPFEDRVNTVAQMCERGHADKMVLSHDANCYFDAMPDELVSQVMPNWHYLHIHNDVIPALKERGVTDEQLHTMLVDNPRRIFERQGAYE

SEQ ID NO: 405 - protein, 326 aa, Artificial Sequence
  Synthetic
MSELNTARGSIDTAALGVTLMHEHVFIMTTEIAENYPEAWGDEDRRVADAVKRLNELKARGVDTIVDLTVIGLGRYIPRIARVAAETELNIVVATGLYTYNDVPMYFHYLGPGGELGGPEIMTDMFVRDIEQGIADTGIKAGILKCATDTPGVTPGVERVLRAVAQAHKRTGVPISTHTHAGLRRGLEQQKIFEEEGVDLSRVIIGHSGDSTDIGYLEELIAAGSYLGMDRFGIDAFLPFEDRVNTVAQMCERGHADKMVLSHDANCYFDAWPDELVSQVMPNWHYLHIHNDVIPALKERGVTDEQLHTMLVDNPRRIFERQGAYE

SEQ ID NO: 406 - protein, 326 aa, Artificial Sequence
  Synthetic
MSELNTARGSIDTAALGVTLMHEHVFIMTTEIAENYPEAWGDEDRRVADAVKRLNELKARGVDTIVDLTVIGLGRYIPRIARVAAETELNIVVATGLYTYNDVPMYFHYLGPGGELGGPEIMTDMFVRDIEQGIADTGIKAGILKCATDTPGVTPGVERVLRAVAQAHKRTGVPISTHTHAGLRRGLEQQKIFEEEGVDLSRVIIGHSGDSTDIGYLEELIAAGSYLGMDRFGIDAFLPFEDRVNTVAQMCERGHADKMVLSHDANCYFDALPGELVSQVMPNWHYLHIHNDVIPALKERGVTDEQLHTMLVDNPRRIFERQGAYE

SEQ ID NO: 407 - protein, 326 aa, Artificial Sequence
  Synthetic
MSELNTARGSIDTAALGVTLMHEHVFIMTTEIAENYPEAWGDEDRRVADAVKRLNELKARGVDTIVDLTVIGLGRYIPRIARVAAETELNIVVATGLYTYNDVPMYFHYLGPGGELGGPEIMTDMFVRDIEQGIADTGIKAGILKCATDTPGVTPGVERVLRAVAQAHKRTGVPISTHTHAGLRRGLEQQKIFEEEGVDLSRVIIGHSGDSTDIGYLEELIAAGSYLGMDRFGIDAFLPFEDRVNTVAQMCERGHADKMVLSHDANCYFDALPWELVSQVMPNWHYLHIHNDVIPALKERGVTDEQLHTMLVDNPRRIFERQGAYE

SEQ ID NO: 408 - protein, 326 aa, Artificial Sequence
  Synthetic
MSELNTARGSIDTAALGVTLMHEHVFIMTTEIAENYPEAWGDEDRRVADAVKRLNELKARGVDTIVDLTVIGLGRYIPRIARVAAETELNIVVATGLYTYNDVPMYFHYLGPGGELGGPEIMTDMFVRDIEQGIADTGIKAGILKCATDTPGVTPGVERVLRAVAQAHKRTGVPISTHTHAGLRRGLEQQKIFEEEGVDLSRVIIGHSGDSTDIGYLEELIAAGSYLGMDRFGIDAFLPFEDRVNTVAQMCERGHADKMVLSHDANCYFDALPDKLVSQVMPNWHYLHIHNDVIPALKERGVTDEQLHTMLVDNPRRIFERQGAYE

SEQ ID NO: 409 - protein, 326 aa, Artificial Sequence
  Synthetic
MSELNTARGSIDTAALGVTLMHEHVFIMTTEIAENYPEAWGDEDRRVADAVKRLNELKARGVDTIVDLTVIGLGRYIPRIARVAAETELNIVVATGLYTYNDVPMYFHYLGPGGELGGPEIMTDMFVRDIEQGIADTGIKAGILKCATDTPGVTPGVERVLRAVAQAHKRTGVPISTHTHAGLRRGLEQQKIFEEEGVDLSRVIIGHSGDSTDIGYLEELIAAGSYLGMDRFGIDAFLPFEDRVNTVAQMCERGHADKMVLSHDANCYFDALPDEWVSQVMPNWHYLHIHNDVIPALKERGVTDEQLHTMLVDNPRRIFERQGAYE

SEQ ID NO: 410 - protein, 326 aa, Artificial Sequence
  Synthetic
MSELNTARGSIDTAALGVTLMHEHVFIMTTEIAENYPEAWGDEDRRVADAVKRLNELKARGVDTIVDLTVIGLGRYIPRIARVAAETELNIVVATGLYTYNDVPMYFHYLGPGGELGGPEIMTDMFVRDIEQGIADTGIKAGILKCATDTPGVTPGVERVLRAVAQAHKRTGVPISTHTHAGLRRGLEQQKIFEEEGVDLSRVIIGHSGDSTDIGYLEELIAAGSYLGMDRFGIDAFLPFEDRVNTVAQMCERGHADKMVLSHDANCYFDALPDELWSQVMPNWHYLHIHNDVIPALKERGVTDEQLHTMLVDNPRRIFERQGAYE

SEQ ID NO: 411 - protein, 326 aa, Artificial Sequence
  Synthetic
MSELNTARGSIDTAALGVTLMHEHVFIMTTEIAENYPEAWGDEDRRVADAVKRLNELKARGVDTIVDLTVIGLGRYIPRIARVAAETELNIVVATGLYTYNDVPMYFHYLGPGGELGGPEIMTDMFVRDIEQGIADTGIKAGILKCATDTPGVTPGVERVLRAVAQAHKRTGVPISTHTHAGLRRGLEQQKIFEEEGVDLSRVIIGHSGDSTDIGYLEELIAAGSYLGMDRFGIDAFLPFEDRVNTVAQMCERGHADKMVLSHDANCYFDALPDELVRQVMPNWHYLHIHNDVIPALKERGVTDEQLHTMLVDNPRRIFERQGAYE

SEQ ID NO: 412 - protein, 326 aa, Artificial Sequence
  Synthetic
MSELNTARGSIDTAALGVTLMHEHVFIMTTEIAENYPEAWGDEDRRVADAVKRLNELKARGVDTIVDLTVIGLGRYIPRIARVAAETELNIVVATGLYTYNDVPMYFHYLGPGGELGGPEIMTDMFVRDIEQGIADTGIKAGILKCATDTPGVTPGVERVLRAVAQAHKRTGVPISTHTHAGLRRGLEQQKIFEEEGVDLSRVIIGHSGDSTDIGYLEELIAAGSYLGMDRFGIDAFLPFEDRVNTVAQMCERGHADKMVLSHDANCYFDALPDELVSHVMPNWHYLHIHNDVIPALKERGVTDEQLHTMLVDNPRRIFERQGAYE

SEQ ID NO: 413 - protein, 326 aa, Artificial Sequence
  Synthetic
MSELNTARGSIDTAALGVTLMHEHVFIMTTEIAENYPEAWGDEDRRVADAVKRLNELKARGVDTIVDLTVIGLGRYIPRIARVAAETELNIVVATGLYTYNDVPMYFHYLGPGGELGGPEIMTDMFVRDIEQGIADTGIKAGILKCATDTPGVTPGVERVLRAVAQAHKRTGVPISTHTHAGLRRGLEQQKIFEEEGVDLSRVIIGHSGDSTDIGYLEELIAAGSYLGMDRFGIDAFLPFEDRVNTVAQMCERGHADKMVLSHDANCYFDALPDELVSKVMPNWHYLHIHNDVIPALKERGVTDEQLHTMLVDNPRRIFERQGAYE

SEQ ID NO: 414 - protein, 326 aa, Artificial Sequence
  Synthetic
MSELNTARGSIDTAALGVTLMHEHVFIMTTEIAENYPEAWGDEDRRVADAVKRLNELKARGVDTIVDLTVIGLGRYIPRIARVAAETELNIVVATGLYTYNDVPMYFHYLGPGGELGGPEIMTDMFVRDIEQGIADTGIKAGILKCATDTPGVTPGVERVLRAVAQAHKRTGVPISTHTHAGLRRGLEQQKIFEEEGVDLSRVIIGHSGDSTDIGYLEELIAAGSYLGMDRFGIDAFLPFEDRVNTVAQMCERGHADKMVLSHDANCYFDALPDELVSRVMPNWHYLHIHNDVIPALKERGVTDEQLHTMLVDNPRRIFERQGAYE

SEQ ID NO: 415 - protein, 326 aa, Artificial Sequence
  Synthetic
MSELNTARGSIDTAALGVTLMHEHVFIMTTEIAENYPEAWGDEDRRVADAVKRLNELKARGVDTIVDLTVIGLGRYIPRIARVAAETELNIVVATGLYTYNDVPMYFHYLGPGGELGGPEIMTDMFVRDIEQGIADTGIKAGILKCATDTPGVTPGVERVLRAVAQAHKRTGVPISTHTHAGLRRGLEQQKIFEEEGVDLSRVIIGHSGDSTDIGYLEELIAAGSYLGMDRFGIDAFLPFEDRVNTVAQMCERGHADKMVLSHDANCYFDALPDELVSQVFPNWHYLHIHNDVIPALKERGVTDEQLHTMLVDNPRRIFERQGAYE

SEQ ID NO: 416 - protein, 326 aa, Artificial Sequence
  Synthetic
MSELNTARGSIDTAALGVTLMHEHVFIMTTEIAENYPEAWGDEDRRVADAVKRLNELKARGVDTIVDLTVIGLGRYIPRIARVAAETELNIVVATGLYTYNDVPMYFHYLGPGGELGGPEIMTDMFVRDIEQGIADTGIKAGILKCATDTPGVTPGVERVLRAVAQAHKRTGVPISTHTHAGLRRGLEQQKIFEEEGVDLSRVIIGHSGDSTDIGYLEELIAAGSYLGMDRFGIDAFLPFEDRVNTVAQMCERGHADKMVLSHDANCYFDALPDELVSQVYPNWHYLHIHNDVIPALKERGVTDEQLHTMLVDNPRRIFERQGAYE

SEQ ID NO: 417 - protein, 326 aa, Artificial Sequence
  Synthetic
MSELNTARGSIDTAALGVTLMHEHVFIMTTEIAENYPEAWGDEDRRVADAVKRLNELKARGVDTIVDLTVIGLGRYIPRIARVAAETELNIVVATGLYTYNDVPMYFHYLGPGGELGGPEIMTDMFVRDIEQGIADTGIKAGILKCATDTPGVTPGVERVLRAVAQAHKRTGVPISTHTHAGLRRGLEQQKIFEEEGVDLSRVIIGHSGDSTDIGYLEELIAAGSYLGMDRFGIDAFLPFEDRVNTVAQMCERGHADKMVLSHDANCYFDALPDELVSQVMGNWHYLHIHNDVIPALKERGVTDEQLHTMLVDNPRRIFERQGAYE

SEQ ID NO: 418 - protein, 326 aa, Artificial Sequence
  Synthetic
MSELNTARGSIDTAALGVTLMHEHVFIMTTEIAENYPEAWGDEDRRVADAVKRLNELKARGVDTIVDLTVIGLGRYIPRIARVAAETELNIVVATGLYTYNDVPMYFHYLGPGGELGGPEIMTDMFVRDIEQGIADTGIKAGILKCATDTPGVTPGVERVLRAVAQAHKRTGVPISTHTHAGLRRGLEQQKIFEEEGVDLSRVIIGHSGDSTDIGYLEELIAAGSYLGMDRFGIDAFLPFEDRVNTVAQMCERGHADKMVLSHDANCYFDALPDELVSQVMPDWHYLHIHNDVIPALKERGVTDEQLHTMLVDNPRRIFERQGAYE

SEQ ID NO: 419 - protein, 326 aa, Artificial Sequence
  Synthetic
MSELNTARGSIDTAALGVTLMHEHVFIMTTEIAENYPEAWGDEDRRVADAVKRLNELKARGVDTIVDLTVIGLGRYIPRIARVAAETELNIVVATGLYTYNDVPMYFHYLGPGGELGGPEIMTDMFVRDIEQGIADTGIKAGILKCATDTPGVTPGVERVLRAVAQAHKRTGVPISTHTHAGLRRGLEQQKIFEEEGVDLSRVIIGHSGDSTDIGYLEELIAAGSYLGMDRFGIDAFLPFEDRVNTVAQMCERGHADKMVLSHDANCYFDALPDELVSQVMPGWHYLHIHNDVIPALKERGVTDEQLHTMLVDNPRRIFERQGAYE

SEQ ID NO: 420 - protein, 326 aa, Artificial Sequence
  Synthetic
MSELNTARGSIDTAALGVTLMHEHVFIMTTEIAENYPEAWGDEDRRVADAVKRLNELKARGVDTIVDLTVIGLGRYIPRIARVAAETELNIVVATGLYTYNDVPMYFHYLGPGGELGGPEIMTDMFVRDIEQGIADTGIKAGILKCATDTPGVTPGVERVLRAVAQAHKRTGVPISTHTHAGLRRGLEQQKIFEEEGVDLSRVIIGHSGDSTDIGYLEELIAAGSYLGMDRFGIDAFLPFEDRVNTVAQMCERGHADKMVLSHDANCYFDALPDELVSQVMPNWGYLHIHNDVIPALKERGVTDEQLHTMLVDNPRRIFERQGAYE

SEQ ID NO: 421 - protein, 326 aa, Artificial Sequence
  Synthetic
MSELNTARGSIDTAALGVTLMHEHVFIMTTEIAENYPEAWGDEDRRVADAVKRLNELKARGVDTIVDLTVIGLGRYIPRIARVAAETELNIVVATGLYTYNDVPMYFHYLGPGGELGGPEIMTDMFVRDIEQGIADTGIKAGILKCATDTPGVTPGVERVLRAVAQAHKRTGVPISTHTHAGLRRGLEQQKIFEEEGVDLSRVIIGHSGDSTDIGYLEELIAAGSYLGMDRFGIDAFLPFEDRVNTVAQMCERGHADKMVLSHDANCYFDALPDELVSQVMPNWHYTHIHNDVIPALKERGVTDEQLHTMLVDNPRRIFERQGAYE

SEQ ID NO: 422 - protein, 326 aa, Artificial Sequence
  Synthetic
MSELNTARGSIDTAALGVTLMHEHVFIMTTEIAENYPEAWGDEDRRVADAVKRLNELKARGVDTIVDLTVIGLGRYIPRIARVAAETELNIVVATGLYTYNDVPMYFHYLGPGGELGGPEIMTDMFVRDIEQGIADTGIKAGILKCATDTPGVTPGVERVLRAVAQAHKRTGVPISTHTHAGLRRGLEQQKIFEEEGVDLSRVIIGHSGDSTDIGYLEELIAAGSYLGMDRFGIDAFLPFEDRVNTVAQMCERGHADKMVLSHDANCYFDALPDELVSQVMPNWHYLFIHNDVIPALKERGVTDEQLHTMLVDNPRRIFERQGAYE

SEQ ID NO: 423 - protein, 326 aa, Artificial Sequence
  Synthetic
MSELNTARGSIDTAALGVTLMHEHVFIMTTEIAENYPEAWGDEDRRVADAVKRLNELKARGVDTIVDLTVIGLGRYIPRIARVAAETELNIVVATGLYTYNDVPMYFHYLGPGGELGGPEIMTDMFVRDIEQGIADTGIKAGILKCATDTPGVTPGVERVLRAVAQAHKRTGVPISTHTHAGLRRGLEQQKIFEEEGVDLSRVIIGHSGDSTDIGYLEELIAAGSYLGMDRFGIDAFLPFEDRVNTVAQMCERGHADKMVLSHDANCYFDALPDELVSQVMPNWHYLYIHNDVIPALKERGVTDEQLHTMLVDNPRRIFERQGAYE

SEQ ID NO: 424 - protein, 326 aa, Artificial Sequence
  Synthetic
MSELNTARGSIDTAALGVTLMHEHVFIMTTEIAENYPEAWGDEDRRVADAVKRLNELKARGVDTIVDLTVIGLGRYIPRIARVAAETELNIVVATGLYTYNDVPMYFHYLGPGGELGGPEIMTDMFVRDIEQGIADTGIKAGILKCATDTPGVTPGVERVLRAVAQAHKRTGVPISTHTHAGLRRGLEQQKIFEEEGVDLSRVIIGHSGDSTDIGYLEELIAAGSYLGMDRFGIDAFLPFEDRVNTVAQMCERGHADKMVLSHDANCYFDALPDELVSQVMPNWHYLHLHNDVIPALKERGVTDEQLHTMLVDNPRRIFERQGAYE

SEQ ID NO: 425 - protein, 326 aa, Artificial Sequence
  Synthetic
MSELNTARGSIDTAALGVTLMHEHVFIMTTEIAENYPEAWGDEDRRVADAVKRLNELKARGVDTIVDLTVIGLGRYIPRIARVAAETELNIVVATGLYTYNDVPMYFHYLGPGGELGGPEIMTDMFVRDIEQGIADTGIKAGILKCATDTPGVTPGVERVLRAVAQAHKRTGVPISTHTHAGLRRGLEQQKIFEEEGVDLSRVIIGHSGDSTDIGYLEELIAAGSYLGMDRFGIDAFLPFEDRVNTVAQMCERGHADKMVLSHDANCYFDALPDELVSQVMPNWHYLHVHNDVIPALKERGVTDEQLHTMLVDNPRRIFERQGAYE

SEQ ID NO: 426 - protein, 326 aa, Artificial Sequence
  Synthetic
MSELNTARGSIDTAALGVTLMHEHVFIMTTEIAENYPEAWGDEDRRVADAVKRLNELKARGVDTIVDLTVIGLGRYIPRIARVAAETELNIVVATGLYTYNDVPMYFHYLGPGGELGGPEIMTDMFVRDIEQGIADTGIKAGILKCATDTPGVTPGVERVLRAVAQAHKRTGVPISTHTHAGLRRGLEQQKIFEEEGVDLSRVIIGHSGDSTDIGYLEELIAAGSYLGMDRFGIDAFLPFEDRVNTVAQMCERGHADKMVLSHDANCYFDALPDELVSQVMPNWHYLHIFNDVIPALKERGVTDEQLHTMLVDNPRRIFERQGAYE

SEQ ID NO: 427 - protein, 326 aa, Artificial Sequence
  Synthetic
MSELNTARGSIDTAALGVTLMHEHVFIMTTEIAENYPEAWGDEDRRVADAVKRLNELKARGVDTIVDLTVIGLGRYIPRIARVAAETELNIVVATGLYTYNDVPMYFHYLGPGGELGGPEIMTDMFVRDIEQGIADTGIKAGILKCATDTPGVTPGVERVLRAVAQAHKRTGVPISTHTHAGLRRGLEQQKIFEEEGVDLSRVIIGHSGDSTDIGYLEELIAAGSYLGMDRFGIDAFLPFEDRVNTVAQMCERGHADKMVLSHDANCYFDALPDELVSQVMPNWHYLHILNDVIPALKERGVTDEQLHTMLVDNPRRIFERQGAYE

SEQ ID NO: 428 - protein, 326 aa, Artificial Sequence
  Synthetic
MSELNTARGSIDTAALGVTLMHEHVFIMTTEIAENYPEAWGDEDRRVADAVKRLNELKARGVDTIVDLTVIGLGRYIPRIARVAAETELNIVVATGLYTYNDVPMYFHYLGPGGELGGPEIMTDMFVRDIEQGIADTGIKAGILKCATDTPGVTPGVERVLRAVAQAHKRTGVPISTHTHAGLRRGLEQQKIFEEEGVDLSRVIIGHSGDSTDIGYLEELIAAGSYLGMDRFGIDAFLPFEDRVNTVAQMCERGHADKMVLSHDANCYFDALPDELVSQVMPNWHYLHIHDDVIPALKERGVTDEQLHTMLVDNPRRIFERQGAYE

SEQ ID NO: 429 - protein, 326 aa, Artificial Sequence
  Synthetic
MSELNTARGSIDTAALGVTLMHEHVFIMTTEIAENYPEAWGDEDRRVADAVKRLNELKARGVDTIVDLTVIGLGRYIPRIARVAAETELNIVVATGLYTYNDVPMYFHYLGPGGELGGPEIMTDMFVRDIEQGIADTGIKAGILKCATDTPGVTPGVERVLRAVAQAHKRTGVPISTHTHAGLRRGLEQQKIFEEEGVDLSRVIIGHSGDSTDIGYLEELIAAGSYLGMDRFGIDAFLPFEDRVNTVAQMCERGHADKMVLSHDANCYFDALPDELVSQVMPNWHYLHIHEDVIPALKERGVTDEQLHTMLVDNPRRIFERQGAYE

SEQ ID NO: 430 - protein, 326 aa, Artificial Sequence
  Synthetic
MSELNTARGSIDTAALGVTLMHEHVFIMTTEIAENYPEAWGDEDRRVADAVKRLNELKARGVDTIVDLTVIGLGRYIPRIARVAAETELNIVVATGLYTYNDVPMYFHYLGPGGELGGPEIMTDMFVRDIEQGIADTGIKAGILKCATDTPGVTPGVERVLRAVAQAHKRTGVPISTHTHAGLRRGLEQQKIFEEEGVDLSRVIIGHSGDSTDIGYLEELIAAGSYLGMDRFGIDAFLPFEDRVNTVAQMCERGHADKMVLSHDANCYFDALPDELVSQVMPNWHYLHIHRDVIPALKERGVTDEQLHTMLVDNPRRIFERQGAYE

SEQ ID NO: 431 - protein, 326 aa, Artificial Sequence
  Synthetic
MSELNTARGSIDTAALGVTLMHEHVFIMTTEIAENYPEAWGDEDRRVADAVKRLNELKARGVDTIVDLTVIGLGRYIPRIARVAAETELNIVVATGLYTYNDVPMYFHYLGPGGELGGPEIMTDMFVRDIEQGIADTGIKAGILKCATDTPGVTPGVERVLRAVAQAHKRTGVPISTHTHAGLRRGLEQQKIFEEEGVDLSRVIIGHSGDSTDIGYLEELIAAGSYLGMDRFGIDAFLPFEDRVNTVAQMCERGHADKMVLSHDANCYFDALPDELVSQVMPNWHYLHIHTDVIPALKERGVTDEQLHTMLVDNPRRIFERQGAYE

SEQ ID NO: 432 - protein, 326 aa, Artificial Sequence
  Synthetic
MSELNTARGSIDTAALGVTLMHEHVFIMTTEIAENYPEAWGDEDRRVADAVKRLNELKARGVDTIVDLTVIGLGRYIPRIARVAAETELNIVVATGLYTYNDVPMYFHYLGPGGELGGPEIMTDMFVRDIEQGIADTGIKAGILKCATDTPGVTPGVERVLRAVAQAHKRTGVPISTHTHAGLRRGLEQQKIFEEEGVDLSRVIIGHSGDSTDIGYLEELIAAGSYLGMDRFGIDAFLPFEDRVNTVAQMCERGHADKMVLSHDANCYFDALPDELVSQVMPNWHYLHIHNNVIPALKERGVTDEQLHTMLVDNPRRIFERQGAYE

SEQ ID NO: 433 - protein, 326 aa, Artificial Sequence
  Synthetic
MSELNTARGSIDTAALGVTLMHEHVFIMTTEIAENYPEAWGDEDRRVADAVKRLNELKARGVDTIVDLTVIGLGRYIPRIARVAAETELNIVVATGLYTYNDVPMYFHYLGPGGELGGPEIMTDMFVRDIEQGIADTGIKAGILKCATDTPGVTPGVERVLRAVAQAHKRTGVPISTHTHAGLRRGLEQQKIFEEEGVDLSRVIIGHSGDSTDIGYLEELIAAGSYLGMDRFGIDAFLPFEDRVNTVAQMCERGHADKMVLSHDANCYFDALPDELVSQVMPNWHYLHIHNRVIPALKERGVTDEQLHTMLVDNPRRIFERQGAYE

SEQ ID NO: 434 - protein, 326 aa, Artificial Sequence
  Synthetic
MSELNTARGSIDTAALGVTLMHEHVFIMTTEIAENYPEAWGDEDRRVADAVKRLNELKARGVDTIVDLTVIGLGRYIPRIARVAAETELNIVVATGLYTYNDVPMYFHYLGPGGELGGPEIMTDMFVRDIEQGIADTGIKAGILKCATDTPGVTPGVERVLRAVAQAHKRTGVPISTHTHAGLRRGLEQQKIFEEEGVDLSRVIIGHSGDSTDIGYLEELIAAGSYLGMDRFGIDAFLPFEDRVNTVAQMCERGHADKMVLSHDANCYFDALPDELVSQVMPNWHYLHIHNDFIPALKERGVTDEQLHTMLVDNPRRIFERQGAYE

SEQ ID NO: 435 - protein, 326 aa, Artificial Sequence
  Synthetic
MSELNTARGSIDTAALGVTLMHEHVFIMTTEIAENYPEAWGDEDRRVADAVKRLNELKARGVDTIVDLTVIGLGRYIPRIARVAAETELNIVVATGLYTYNDVPMYFHYLGPGGELGGPEIMTDMFVRDIEQGIADTGIKAGILKCATDTPGVTPGVERVLRAVAQAHKRTGVPISTHTHAGLRRGLEQQKIFEEEGVDLSRVIIGHSGDSTDIGYLEELIAAGSYLGMDRFGIDAFLPFEDRVNTVAQMCERGHADKMVLSHDANCYFDALPDELVSQVMPNWHYLHIHNDIIPALKERGVTDEQLHTMLVDNPRRIFERQGAYE

SEQ ID NO: 436 - protein, 326 aa, Artificial Sequence
  Synthetic
MSELNTARGSIDTAALGVTLMHEHVFIMTTEIAENYPEAWGDEDRRVADAVKRLNELKARGVDTIVDLTVIGLGRYIPRIARVAAETELNIVVATGLYTYNDVPMYFHYLGPGGELGGPEIMTDMFVRDIEQGIADTGIKAGILKCATDTPGVTPGVERVLRAVAQAHKRTGVPISTHTHAGLRRGLEQQKIFEEEGVDLSRVIIGHSGDSTDIGYLEELIAAGSYLGMDRFGIDAFLPFEDRVNTVAQMCERGHADKMVLSHDANCYFDALPDELVSQVMPNWHYLHIHNDVLPALKERGVTDEQLHTMLVDNPRRIFERQGAYE

SEQ ID NO: 437 - protein, 326 aa, Artificial Sequence
  Synthetic
MSELNTARGSIDTAALGVTLMHEHVFIMTTEIAENYPEAWGDEDRRVADAVKRLNELKARGVDTIVDLTVIGLGRYIPRIARVAAETELNIVVATGLYTYNDVPMYFHYLGPGGELGGPEIMTDMFVRDIEQGIADTGIKAGILKCATDTPGVTPGVERVLRAVAQAHKRTGVPISTHTHAGLRRGLEQQKIFEEEGVDLSRVIIGHSGDSTDIGYLEELIAAGSYLGMDRFGIDAFLPFEDRVNTVAQMCERGHADKMVLSHDANCYFDALPDELVSQVMPNWHYLHIHNDVVPALKERGVTDEQLHTMLVDNPRRIFERQGAYE

SEQ ID NO: 438 - protein, 326 aa, Artificial Sequence
  Synthetic
MSELNTARGSIDTAALGVTLMHEHVFIMTTEIAENYPEAWGDEDRRVADAVKRLNELKARGVDTIVDLTVIGLGRYIPRIARVAAETELNIVVATGLYTYNDVPMYFHYLGPGGELGGPEIMTDMFVRDIEQGIADTGIKAGILKCATDTPGVTPGVERVLRAVAQAHKRTGVPISTHTHAGLRRGLEQQKIFEEEGVDLSRVIIGHSGDSTDIGYLEELIAAGSYLGMDRFGIDAFLPFEDRVNTVAQMCERGHADKMVLSHDANCYFDALPDELVSQVMPNWHYLHIHNDVIPMLKERGVTDEQLHTMLVDNPRRIFERQGAYE

SEQ ID NO: 439 - protein, 326 aa, Artificial Sequence
  Synthetic
MSELNTARGSIDTAALGVTLMHEHVFIMTTEIAENYPEAWGDEDRRVADAVKRLNELKARGVDTIVDLTVIGLGRYIPRIARVAAETELNIVVATGLYTYNDVPMYFHYLGPGGELGGPEIMTDMFVRDIEQGIADTGIKAGILKCATDTPGVTPGVERVLRAVAQAHKRTGVPISTHTHAGLRRGLEQQKIFEEEGVDLSRVIIGHSGDSTDIGYLEELIAAGSYLGMDRFGIDAFLPFEDRVNTVAQMCERGHADKMVLSHDANCYFDALPDELVSQVMPNWHYLHIHNDVIPRLKERGVTDEQLHTMLVDNPRRIFERQGAYE

SEQ ID NO: 440 - protein, 326 aa, Artificial Sequence
  Synthetic
MSELNTARGSIDTAALGVTLMHEHVFIMTTEIAENYPEAWGDEDRRVADAVKRLNELKARGVDTIVDLTVIGLGRYIPRIARVAAETELNIVVATGLYTYNDVPMYFHYLGPGGELGGPEIMTDMFVRDIEQGIADTGIKAGILKCATDTPGVTPGVERVLRAVAQAHKRTGVPISTHTHAGLRRGLEQQKIFEEEGVDLSRVIIGHSGDSTDIGYLEELIAAGSYLGMDRFGIDAFLPFEDRVNTVAQMCERGHADKMVLSHDANCYFDALPDELVSQVMPNWHYLHIHNDVIPALMERGVTDEQLHTMLVDNPRRIFERQGAYE

SEQ ID NO: 441 - protein, 326 aa, Artificial Sequence
  Synthetic
MSELNTARGSIDTAALGVTLMHEHVFIMTTEIAENYPEAWGDEDRRVADAVKRLNELKARGVDTIVDLTVIGLGRYIPRIARVAAETELNIVVATGLYTYNDVPMYFHYLGPGGELGGPEIMTDMFVRDIEQGIADTGIKAGILKCATDTPGVTPGVERVLRAVAQAHKRTGVPISTHTHAGLRRGLEQQKIFEEEGVDLSRVIIGHSGDSTDIGYLEELIAAGSYLGMDRFGIDAFLPFEDRVNTVAQMCERGHADKMVLSHDANCYFDALPDELVSQVMPNWHYLHIHNDVIPALRERGVTDEQLHTMLVDNPRRIFERQGAYE

SEQ ID NO: 442 - protein, 326 aa, Artificial Sequence
  Synthetic
MSELNTARGSIDTAALGVTLMHEHVFIMTTEIAENYPEAWGDEDRRVADAVKRLNELKARGVDTIVDLTVIGLGRYIPRIARVAAETELNIVVATGLYTYNDVPMYFHYLGPGGELGGPEIMTDMFVRDIEQGIADTGIKAGILKCATDTPGVTPGVERVLRAVAQAHKRTGVPISTHTHAGLRRGLEQQKIFEEEGVDLSRVIIGHSGDSTDIGYLEELIAAGSYLGMDRFGIDAFLPFEDRVNTVAQMCERGHADKMVLSHDANCYFDALPDELVSQVMPNWHYLHIHNDVIPALKKRGVTDEQLHTMLVDNPRRIFERQGAYE

SEQ ID NO: 443 - protein, 326 aa, Artificial Sequence
  Synthetic
MSELNTARGSIDTAALGVTLMHEHVFIMTTEIAENYPEAWGDEDRRVADAVKRLNELKARGVDTIVDLTVIGLGRYIPRIARVAAETELNIVVATGLYTYNDVPMYFHYLGPGGELGGPEIMTDMFVRDIEQGIADTGIKAGILKCATDTPGVTPGVERVLRAVAQAHKRTGVPISTHTHAGLRRGLEQQKIFEEEGVDLSRVIIGHSGDSTDIGYLEELIAAGSYLGMDRFGIDAFLPFEDRVNTVAQMCERGHADKMVLSHDANCYFDALPDELVSQVMPNWHYLHIHNDVIPALKQRGVTDEQLHTMLVDNPRRIFERQGAYE

SEQ ID NO: 444 - protein, 326 aa, Artificial Sequence
  Synthetic
MSELNTARGSIDTAALGVTLMHEHVFIMTTEIAENYPEAWGDEDRRVADAVKRLNELKARGVDTIVDLTVIGLGRYIPRIARVAAETELNIVVATGLYTYNDVPMYFHYLGPGGELGGPEIMTDMFVRDIEQGIADTGIKAGILKCATDTPGVTPGVERVLRAVAQAHKRTGVPISTHTHAGLRRGLEQQKIFEEEGVDLSRVIIGHSGDSTDIGYLEELIAAGSYLGMDRFGIDAFLPFEDRVNTVAQMCERGHADKMVLSHDANCYFDALPDELVSQVMPNWHYLHIHNDVIPALKRRGVTDEQLHTMLVDNPRRIFERQGAYE

SEQ ID NO: 445 - protein, 326 aa, Artificial Sequence
  Synthetic
MSELNTARGSIDTAALGVTLMHEHVFIMTTEIAENYPEAWGDEDRRVADAVKRLNELKARGVDTIVDLTVIGLGRYIPRIARVAAETELNIVVATGLYTYNDVPMYFHYLGPGGELGGPEIMTDMFVRDIEQGIADTGIKAGILKCATDTPGVTPGVERVLRAVAQAHKRTGVPISTHTHAGLRRGLEQQKIFEEEGVDLSRVIIGHSGDSTDIGYLEELIAAGSYLGMDRFGIDAFLPFEDRVNTVAQMCERGHADKMVLSHDANCYFDALPDELVSQVMPNWHYLHIHNDVIPALKEAGVTDEQLHTMLVDNPRRIFERQGAYE

SEQ ID NO: 446 - protein, 326 aa, Artificial Sequence
  Synthetic
MSELNTARGSIDTAALGVTLMHEHVFIMTTEIAENYPEAWGDEDRRVADAVKRLNELKARGVDTIVDLTVIGLGRYIPRIARVAAETELNIVVATGLYTYNDVPMYFHYLGPGGELGGPEIMTDMFVRDIEQGIADTGIKAGILKCATDTPGVTPGVERVLRAVAQAHKRTGVPISTHTHAGLRRGLEQQKIFEEEGVDLSRVIIGHSGDSTDIGYLEELIAAGSYLGMDRFGIDAFLPFEDRVNTVAQMCERGHADKMVLSHDANCYFDALPDELVSQVMPNWHYLHIHNDVIPALKERGVDDEQLHTMLVDNPRRIFERQGAYE

SEQ ID NO: 447 - protein, 326 aa, Artificial Sequence
  Synthetic
MSELNTARGSIDTAALGVTLMHEHVFIMTTEIAENYPEAWGDEDRRVADAVKRLNELKARGVDTIVDLTVIGLGRYIPRIARVAAETELNIVVATGLYTYNDVPMYFHYLGPGGELGGPEIMTDMFVRDIEQGIADTGIKAGILKCATDTPGVTPGVERVLRAVAQAHKRTGVPISTHTHAGLRRGLEQQKIFEEEGVDLSRVIIGHSGDSTDIGYLEELIAAGSYLGMDRFGIDAFLPFEDRVNTVAQMCERGHADKMVLSHDANCYFDALPDELVSQVMPNWHYLHIHNDVIPALKERGVSDEQLHTMLVDNPRRIFERQGAYE

SEQ ID NO: 448 - protein, 326 aa, Artificial Sequence
  Synthetic
MSELNTARGSIDTAALGVTLMHEHVFIMTTEIAENYPEAWGDEDRRVADAVKRLNELKARGVDTIVDLTVIGLGRYIPRIARVAAETELNIVVATGLYTYNDVPMYFHYLGPGGELGGPEIMTDMFVRDIEQGIADTGIKAGILKCATDTPGVTPGVERVLRAVAQAHKRTGVPISTHTHAGLRRGLEQQKIFEEEGVDLSRVIIGHSGDSTDIGYLEELIAAGSYLGMDRFGIDAFLPFEDRVNTVAQMCERGHADKMVLSHDANCYFDALPDELVSQVMPNWHYLHIHNDVIPALKERGVTEEQLHTMLVDNPRRIFERQGAYE

SEQ ID NO: 449 - protein, 326 aa, Artificial Sequence
  Synthetic
MSELNTARGSIDTAALGVTLMHEHVFIMTTEIAENYPEAWGDEDRRVADAVKRLNELKARGVDTIVDLTVIGLGRYIPRIARVAAETELNIVVATGLYTYNDVPMYFHYLGPGGELGGPEIMTDMFVRDIEQGIADTGIKAGILKCATDTPGVTPGVERVLRAVAQAHKRTGVPISTHTHAGLRRGLEQQKIFEEEGVDLSRVIIGHSGDSTDIGYLEELIAAGSYLGMDRFGIDAFLPFEDRVNTVAQMCERGHADKMVLSHDANCYFDALPDELVSQVMPNWHYLHIHNDVIPALKERGVTQEQLHTMLVDNPRRIFERQGAYE

SEQ ID NO: 450 - protein, 326 aa, Artificial Sequence
  Synthetic
MSELNTARGSIDTAALGVTLMHEHVFIMTTEIAENYPEAWGDEDRRVADAVKRLNELKARGVDTIVDLTVIGLGRYIPRIARVAAETELNIVVATGLYTYNDVPMYFHYLGPGGELGGPEIMTDMFVRDIEQGIADTGIKAGILKCATDTPGVTPGVERVLRAVAQAHKRTGVPISTHTHAGLRRGLEQQKIFEEEGVDLSRVIIGHSGDSTDIGYLEELIAAGSYLGMDRFGIDAFLPFEDRVNTVAQMCERGHADKMVLSHDANCYFDALPDELVSQVMPNWHYLHIHNDVIPALKERGVTDAQLHTMLVDNPRRIFERQGAYE

SEQ ID NO: 451 - protein, 326 aa, Artificial Sequence
  Synthetic
MSELNTARGSIDTAALGVTLMHEHVFIMTTEIAENYPEAWGDEDRRVADAVKRLNELKARGVDTIVDLTVIGLGRYIPRIARVAAETELNIVVATGLYTYNDVPMYFHYLGPGGELGGPEIMTDMFVRDIEQGIADTGIKAGILKCATDTPGVTPGVERVLRAVAQAHKRTGVPISTHTHAGLRRGLEQQKIFEEEGVDLSRVIIGHSGDSTDIGYLEELIAAGSYLGMDRFGIDAFLPFEDRVNTVAQMCERGHADKMVLSHDANCYFDALPDELVSQVMPNWHYLHIHNDVIPALKERGVTDDQLHTMLVDNPRRIFERQGAYE

SEQ ID NO: 452 - protein, 326 aa, Artificial Sequence
  Synthetic
MSELNTARGSIDTAALGVTLMHEHVFIMTTEIAENYPEAWGDEDRRVADAVKRLNELKARGVDTIVDLTVIGLGRYIPRIARVAAETELNIVVATGLYTYNDVPMYFHYLGPGGELGGPEIMTDMFVRDIEQGIADTGIKAGILKCATDTPGVTPGVERVLRAVAQAHKRTGVPISTHTHAGLRRGLEQQKIFEEEGVDLSRVIIGHSGDSTDIGYLEELIAAGSYLGMDRFGIDAFLPFEDRVNTVAQMCERGHADKMVLSHDANCYFDALPDELVSQVMPNWHYLHIHNDVIPALKERGVTDEDLHTMLVDNPRRIFERQGAYE

SEQ ID NO: 453 - protein, 326 aa, Artificial Sequence
  Synthetic
MSELNTARGSIDTAALGVTLMHEHVFIMTTEIAENYPEAWGDEDRRVADAVKRLNELKARGVDTIVDLTVIGLGRYIPRIARVAAETELNIVVATGLYTYNDVPMYFHYLGPGGELGGPEIMTDMFVRDIEQGIADTGIKAGILKCATDTPGVTPGVERVLRAVAQAHKRTGVPISTHTHAGLRRGLEQQKIFEEEGVDLSRVIIGHSGDSTDIGYLEELIAAGSYLGMDRFGIDAFLPFEDRVNTVAQMCERGHADKMVLSHDANCYFDALPDELVSQVMPNWHYLHIHNDVIPALKERGVTDEELHTMLVDNPRRIFERQGAYE

SEQ ID NO: 454 - protein, 326 aa, Artificial Sequence
  Synthetic
MSELNTARGSIDTAALGVTLMHEHVFIMTTEIAENYPEAWGDEDRRVADAVKRLNELKARGVDTIVDLTVIGLGRYIPRIARVAAETELNIVVATGLYTYNDVPMYFHYLGPGGELGGPEIMTDMFVRDIEQGIADTGIKAGILKCATDTPGVTPGVERVLRAVAQAHKRTGVPISTHTHAGLRRGLEQQKIFEEEGVDLSRVIIGHSGDSTDIGYLEELIAAGSYLGMDRFGIDAFLPFEDRVNTVAQMCERGHADKMVLSHDANCYFDALPDELVSQVMPNWHYLHIHNDVIPALKERGVTDEQIHTMLVDNPRRIFERQGAYE

SEQ ID NO: 455 - protein, 326 aa, Artificial Sequence
  Synthetic
MSELNTARGSIDTAALGVTLMHEHVFIMTTEIAENYPEAWGDEDRRVADAVKRLNELKARGVDTIVDLTVIGLGRYIPRIARVAAETELNIVVATGLYTYNDVPMYFHYLGPGGELGGPEIMTDMFVRDIEQGIADTGIKAGILKCATDTPGVTPGVERVLRAVAQAHKRTGVPISTHTHAGLRRGLEQQKIFEEEGVDLSRVIIGHSGDSTDIGYLEELIAAGSYLGMDRFGIDAFLPFEDRVNTVAQMCERGHADKMVLSHDANCYFDALPDELVSQVMPNWHYLHIHNDVIPALKERGVTDEQVHTMLVDNPRRIFERQGAYE

SEQ ID NO: 456 - protein, 326 aa, Artificial Sequence
  Synthetic
MSELNTARGSIDTAALGVTLMHEHVFIMTTEIAENYPEAWGDEDRRVADAVKRLNELKARGVDTIVDLTVIGLGRYIPRIARVAAETELNIVVATGLYTYNDVPMYFHYLGPGGELGGPEIMTDMFVRDIEQGIADTGIKAGILKCATDTPGVTPGVERVLRAVAQAHKRTGVPISTHTHAGLRRGLEQQKIFEEEGVDLSRVIIGHSGDSTDIGYLEELIAAGSYLGMDRFGIDAFLPFEDRVNTVAQMCERGHADKMVLSHDANCYFDALPDELVSQVMPNWHYLHIHNDVIPALKERGVTDEQLETMLVDNPRRIFERQGAYE

SEQ ID NO: 457 - protein, 326 aa, Artificial Sequence
  Synthetic
MSELNTARGSIDTAALGVTLMHEHVFIMTTEIAENYPEAWGDEDRRVADAVKRLNELKARGVDTIVDLTVIGLGRYIPRIARVAAETELNIVVATGLYTYNDVPMYFHYLGPGGELGGPEIMTDMFVRDIEQGIADTGIKAGILKCATDTPGVTPGVERVLRAVAQAHKRTGVPISTHTHAGLRRGLEQQKIFEEEGVDLSRVIIGHSGDSTDIGYLEELIAAGSYLGMDRFGIDAFLPFEDRVNTVAQMCERGHADKMVLSHDANCYFDALPDELVSQVMPNWHYLHIHNDVIPALKERGVTDEQLNTMLVDNPRRIFERQGAYE

SEQ ID NO: 458 - protein, 326 aa, Artificial Sequence
  Synthetic
MSELNTARGSIDTAALGVTLMHEHVFIMTTEIAENYPEAWGDEDRRVADAVKRLNELKARGVDTIVDLTVIGLGRYIPRIARVAAETELNIVVATGLYTYNDVPMYFHYLGPGGELGGPEIMTDMFVRDIEQGIADTGIKAGILKCATDTPGVTPGVERVLRAVAQAHKRTGVPISTHTHAGLRRGLEQQKIFEEEGVDLSRVIIGHSGDSTDIGYLEELIAAGSYLGMDRFGIDAFLPFEDRVNTVAQMCERGHADKMVLSHDANCYFDALPDELVSQVMPNWHYLHIHNDVIPALKERGVTDEQLRTMLVDNPRRIFERQGAYE

SEQ ID NO: 459 - protein, 326 aa, Artificial Sequence
  Synthetic
MSELNTARGSIDTAALGVTLMHEHVFIMTTEIAENYPEAWGDEDRRVADAVKRLNELKARGVDTIVDLTVIGLGRYIPRIARVAAETELNIVVATGLYTYNDVPMYFHYLGPGGELGGPEIMTDMFVRDIEQGIADTGIKAGILKCATDTPGVTPGVERVLRAVAQAHKRTGVPISTHTHAGLRRGLEQQKIFEEEGVDLSRVIIGHSGDSTDIGYLEELIAAGSYLGMDRFGIDAFLPFEDRVNTVAQMCERGHADKMVLSHDANCYFDALPDELVSQVMPNWHYLHIHNDVIPALKERGVTDEQLHKMLVDNPRRIFERQGAYE

SEQ ID NO: 460 - protein, 326 aa, Artificial Sequence
  Synthetic
MSELNTARGSIDTAALGVTLMHEHVFIMTTEIAENYPEAWGDEDRRVADAVKRLNELKARGVDTIVDLTVIGLGRYIPRIARVAAETELNIVVATGLYTYNDVPMYFHYLGPGGELGGPEIMTDMFVRDIEQGIADTGIKAGILKCATDTPGVTPGVERVLRAVAQAHKRTGVPISTHTHAGLRRGLEQQKIFEEEGVDLSRVIIGHSGDSTDIGYLEELIAAGSYLGMDRFGIDAFLPFEDRVNTVAQMCERGHADKMVLSHDANCYFDALPDELVSQVMPNWHYLHIHNDVIPALKERGVTDEQLHQMLVDNPRRIFERQGAYE

SEQ ID NO: 461 - protein, 326 aa, Artificial Sequence
  Synthetic
MSELNTARGSIDTAALGVTLMHEHVFIMTTEIAENYPEAWGDEDRRVADAVKRLNELKARGVDTIVDLTVIGLGRYIPRIARVAAETELNIVVATGLYTYNDVPMYFHYLGPGGELGGPEIMTDMFVRDIEQGIADTGIKAGILKCATDTPGVTPGVERVLRAVAQAHKRTGVPISTHTHAGLRRGLEQQKIFEEEGVDLSRVIIGHSGDSTDIGYLEELIAAGSYLGMDRFGIDAFLPFEDRVNTVAQMCERGHADKMVLSHDANCYFDALPDELVSQVMPNWHYLHIHNDVIPALKERGVTDEQLHRMLVDNPRRIFERQGAYE

SEQ ID NO: 462 - protein, 326 aa, Artificial Sequence
  Synthetic
MSELNTARGSIDTAALGVTLMHEHVFIMTTEIAENYPEAWGDEDRRVADAVKRLNELKARGVDTIVDLTVIGLGRYIPRIARVAAETELNIVVATGLYTYNDVPMYFHYLGPGGELGGPEIMTDMFVRDIEQGIADTGIKAGILKCATDTPGVTPGVERVLRAVAQAHKRTGVPISTHTHAGLRRGLEQQKIFEEEGVDLSRVIIGHSGDSTDIGYLEELIAAGSYLGMDRFGIDAFLPFEDRVNTVAQMCERGHADKMVLSHDANCYFDALPDELVSQVMPNWHYLHIHNDVIPALKERGVTDEQLHTMFVDNPRRIFERQGAYE

SEQ ID NO: 463 - protein, 326 aa, Artificial Sequence
  Synthetic
MSELNTARGSIDTAALGVTLMHEHVFIMTTEIAENYPEAWGDEDRRVADAVKRLNELKARGVDTIVDLTVIGLGRYIPRIARVAAETELNIVVATGLYTYNDVPMYFHYLGPGGELGGPEIMTDMFVRDIEQGIADTGIKAGILKCATDTPGVTPGVERVLRAVAQAHKRTGVPISTHTHAGLRRGLEQQKIFEEEGVDLSRVIIGHSGDSTDIGYLEELIAAGSYLGMDRFGIDAFLPFEDRVNTVAQMCERGHADKMVLSHDANCYFDALPDELVSQVMPNWHYLHIHNDVIPALKERGVTDEQLHTMMVDNPRRIFERQGAYE

SEQ ID NO: 464 - protein, 326 aa, Artificial Sequence
  Synthetic
MSELNTARGSIDTAALGVTLMHEHVFIMTTEIAENYPEAWGDEDRRVADAVKRLNELKARGVDTIVDLTVIGLGRYIPRIARVAAETELNIVVATGLYTYNDVPMYFHYLGPGGELGGPEIMTDMFVRDIEQGIADTGIKAGILKCATDTPGVTPGVERVLRAVAQAHKRTGVPISTHTHAGLRRGLEQQKIFEEEGVDLSRVIIGHSGDSTDIGYLEELIAAGSYLGMDRFGIDAFLPFEDRVNTVAQMCERGHADKMVLSHDANCYFDALPDELVSQVMPNWHYLHIHNDVIPALKERGVTDEQLHTMTVDNPRRIFERQGAYE

SEQ ID NO: 465 - protein, 326 aa, Artificial Sequence
  Synthetic
MSELNTARGSIDTAALGVTLMHEHVFIMTTEIAENYPEAWGDEDRRVADAVKRLNELKARGVDTIVDLTVIGLGRYIPRIARVAAETELNIVVATGLYTYNDVPMYFHYLGPGGELGGPEIMTDMFVRDIEQGIADTGIKAGILKCATDTPGVTPGVERVLRAVAQAHKRTGVPISTHTHAGLRRGLEQQKIFEEEGVDLSRVIIGHSGDSTDIGYLEELIAAGSYLGMDRFGIDAFLPFEDRVNTVAQMCERGHADKMVLSHDANCYFDALPDELVSQVMPNWHYLHIHNDVIPALKERGVTDEQLHTMLIDNPRRIFERQGAYE

SEQ ID NO: 466 - protein, 326 aa, Artificial Sequence
  Synthetic
MSELNTARGSIDTAALGVTLMHEHVFIMTTEIAENYPEAWGDEDRRVADAVKRLNELKARGVDTIVDLTVIGLGRYIPRIARVAAETELNIVVATGLYTYNDVPMYFHYLGPGGELGGPEIMTDMFVRDIEQGIADTGIKAGILKCATDTPGVTPGVERVLRAVAQAHKRTGVPISTHTHAGLRRGLEQQKIFEEEGVDLSRVIIGHSGDSTDIGYLEELIAAGSYLGMDRFGIDAFLPFEDRVNTVAQMCERGHADKMVLSHDANCYFDALPDELVSQVMPNWHYLHIHNDVIPALKERGVTDEQLHTMLVENPRRIFERQGAYE

SEQ ID NO: 467 - protein, 326 aa, Artificial Sequence
  Synthetic
MSELNTARGSIDTAALGVTLMHEHVFIMTTEIAENYPEAWGDEDRRVADAVKRLNELKARGVDTIVDLTVIGLGRYIPRIARVAAETELNIVVATGLYTYNDVPMYFHYLGPGGELGGPEIMTDMFVRDIEQGIADTGIKAGILKCATDTPGVTPGVERVLRAVAQAHKRTGVPISTHTHAGLRRGLEQQKIFEEEGVDLSRVIIGHSGDSTDIGYLEELIAAGSYLGMDRFGIDAFLPFEDRVNTVAQMCERGHADKMVLSHDANCYFDALPDELVSQVMPNWHYLHIHNDVIPALKERGVTDEQLHTMLVDNPARIFERQGAYE

SEQ ID NO: 468 - protein, 326 aa, Artificial Sequence
  Synthetic
MSELNTARGSIDTAALGVTLMHEHVFIMTTEIAENYPEAWGDEDRRVADAVKRLNELKARGVDTIVDLTVIGLGRYIPRIARVAAETELNIVVATGLYTYNDVPMYFHYLGPGGELGGPEIMTDMFVRDIEQGIADTGIKAGILKCATDTPGVTPGVERVLRAVAQAHKRTGVPISTHTHAGLRRGLEQQKIFEEEGVDLSRVIIGHSGDSTDIGYLEELIAAGSYLGMDRFGIDAFLPFEDRVNTVAQMCERGHADKMVLSHDANCYFDALPDELVSQVMPNWHYLHIHNDVIPALKERGVTDEQLHTMLVDNPKRIFERQGAYE

SEQ ID NO: 469 - protein, 326 aa, Artificial Sequence
  Synthetic
MSELNTARGSIDTAALGVTLMHEHVFIMTTEIAENYPEAWGDEDRRVADAVKRLNELKARGVDTIVDLTVIGLGRYIPRIARVAAETELNIVVATGLYTYNDVPMYFHYLGPGGELGGPEIMTDMFVRDIEQGIADTGIKAGILKCATDTPGVTPGVERVLRAVAQAHKRTGVPISTHTHAGLRRGLEQQKIFEEEGVDLSRVIIGHSGDSTDIGYLEELIAAGSYLGMDRFGIDAFLPFEDRVNTVAQMCERGHADKMVLSHDANCYFDALPDELVSQVMPNWHYLHIHNDVIPALKERGVTDEQLHTMLVDNPQRIFERQGAYE

SEQ ID NO: 470 - protein, 326 aa, Artificial Sequence
  Synthetic
MSELNTARGSIDTAALGVTLMHEHVFIMTTEIAENYPEAWGDEDRRVADAVKRLNELKARGVDTIVDLTVIGLGRYIPRIARVAAETELNIVVATGLYTYNDVPMYFHYLGPGGELGGPEIMTDMFVRDIEQGIADTGIKAGILKCATDTPGVTPGVERVLRAVAQAHKRTGVPISTHTHAGLRRGLEQQKIFEEEGVDLSRVIIGHSGDSTDIGYLEELIAAGSYLGMDRFGIDAFLPFEDRVNTVAQMCERGHADKMVLSHDANCYFDALPDELVSQVMPNWHYLHIHNDVIPALKERGVTDEQLHTMLVDNPRKIFERQGAYE

SEQ ID NO: 471 - protein, 326 aa, Artificial Sequence
  Synthetic
MSELNTARGSIDTAALGVTLMHEHVFIMTTEIAENYPEAWGDEDRRVADAVKRLNELKARGVDTIVDLTVIGLGRYIPRIARVAAETELNIVVATGLYTYNDVPMYFHYLGPGGELGGPEIMTDMFVRDIEQGIADTGIKAGILKCATDTPGVTPGVERVLRAVAQAHKRTGVPISTHTHAGLRRGLEQQKIFEEEGVDLSRVIIGHSGDSTDIGYLEELIAAGSYLGMDRFGIDAFLPFEDRVNTVAQMCERGHADKMVLSHDANCYFDALPDELVSQVMPNWHYLHIHNDVIPALKERGVTDEQLHTMLVDNPRNIFERQGAYE

SEQ ID NO: 472 - protein, 326 aa, Artificial Sequence
  Synthetic
MSELNTARGSIDTAALGVTLMHEHVFIMTTEIAENYPEAWGDEDRRVADAVKRLNELKARGVDTIVDLTVIGLGRYIPRIARVAAETELNIVVATGLYTYNDVPMYFHYLGPGGELGGPEIMTDMFVRDIEQGIADTGIKAGILKCATDTPGVTPGVERVLRAVAQAHKRTGVPISTHTHAGLRRGLEQQKIFEEEGVDLSRVIIGHSGDSTDIGYLEELIAAGSYLGMDRFGIDAFLPFEDRVNTVAQMCERGHADKMVLSHDANCYFDALPDELVSQVMPNWHYLHIHNDVIPALKERGVTDEQLHTMLVDNPRRFFERQGAYE

SEQ ID NO: 473 - protein, 326 aa, Artificial Sequence
  Synthetic
MSELNTARGSIDTAALGVTLMHEHVFIMTTEIAENYPEAWGDEDRRVADAVKRLNELKARGVDTIVDLTVIGLGRYIPRIARVAAETELNIVVATGLYTYNDVPMYFHYLGPGGELGGPEIMTDMFVRDIEQGIADTGIKAGILKCATDTPGVTPGVERVLRAVAQAHKRTGVPISTHTHAGLRRGLEQQKIFEEEGVDLSRVIIGHSGDSTDIGYLEELIAAGSYLGMDRFGIDAFLPFEDRVNTVAQMCERGHADKMVLSHDANCYFDALPDELVSQVMPNWHYLHIHNDVIPALKERGVTDEQLHTMLVDNPRRLFERQGAYE

SEQ ID NO: 474 - protein, 326 aa, Artificial Sequence
  Synthetic
MSELNTARGSIDTAALGVTLMHEHVFIMTTEIAENYPEAWGDEDRRVADAVKRLNELKARGVDTIVDLTVIGLGRYIPRIARVAAETELNIVVATGLYTYNDVPMYFHYLGPGGELGGPEIMTDMFVRDIEQGIADTGIKAGILKCATDTPGVTPGVERVLRAVAQAHKRTGVPISTHTHAGLRRGLEQQKIFEEEGVDLSRVIIGHSGDSTDIGYLEELIAAGSYLGMDRFGIDAFLPFEDRVNTVAQMCERGHADKMVLSHDANCYFDALPDELVSQVMPNWHYLHIHNDVIPALKERGVTDEQLHTMLVDNPRRMFERQGAYE

SEQ ID NO: 475 - protein, 326 aa, Artificial Sequence
  Synthetic
MSELNTARGSIDTAALGVTLMHEHVFIMTTEIAENYPEAWGDEDRRVADAVKRLNELKARGVDTIVDLTVIGLGRYIPRIARVAAETELNIVVATGLYTYNDVPMYFHYLGPGGELGGPEIMTDMFVRDIEQGIADTGIKAGILKCATDTPGVTPGVERVLRAVAQAHKRTGVPISTHTHAGLRRGLEQQKIFEEEGVDLSRVIIGHSGDSTDIGYLEELIAAGSYLGMDRFGIDAFLPFEDRVNTVAQMCERGHADKMVLSHDANCYFDALPDELVSQVMPNWHYLHIHNDVIPALKERGVTDEQLHTMLVDNPRRIFDRQGAYE

SEQ ID NO: 476 - protein, 326 aa, Artificial Sequence
  Synthetic
MSELNTARGSIDTAALGVTLMHEHVFIMTTEIAENYPEAWGDEDRRVADAVKRLNELKARGVDTIVDLTVIGLGRYIPRIARVAAETELNIVVATGLYTYNDVPMYFHYLGPGGELGGPEIMTDMFVRDIEQGIADTGIKAGILKCATDTPGVTPGVERVLRAVAQAHKRTGVPISTHTHAGLRRGLEQQKIFEEEGVDLSRVIIGHSGDSTDIGYLEELIAAGSYLGMDRFGIDAFLPFEDRVNTVAQMCERGHADKMVLSHDANCYFDALPDELVSQVMPNWHYLHIHNDVIPALKERGVTDEQLHTMLVDNPRRIFQRQGAYE

SEQ ID NO: 477 - protein, 326 aa, Artificial Sequence
  Synthetic
MSELNTARGSIDTAALGVTLMHEHVFIMTTEIAENYPEAWGDEDRRVADAVKRLNELKARGVDTIVDLTVIGLGRYIPRIARVAAETELNIVVATGLYTYNDVPMYFHYLGPGGELGGPEIMTDMFVRDIEQGIADTGIKAGILKCATDTPGVTPGVERVLRAVAQAHKRTGVPISTHTHAGLRRGLEQQKIFEEEGVDLSRVIIGHSGDSTDIGYLEELIAAGSYLGMDRFGIDAFLPFEDRVNTVAQMCERGHADKMVLSHDANCYFDALPDELVSQVMPNWHYLHIHNDVIPALKERGVTDEQLHTMLVDNPRRIFSRQGAYE

SEQ ID NO: 478 - protein, 326 aa, Artificial Sequence
  Synthetic
MSELNTARGSIDTAALGVTLMHEHVFIMTTEIAENYPEAWGDEDRRVADAVKRLNELKARGVDTIVDLTVIGLGRYIPRIARVAAETELNIVVATGLYTYNDVPMYFHYLGPGGELGGPEIMTDMFVRDIEQGIADTGIKAGILKCATDTPGVTPGVERVLRAVAQAHKRTGVPISTHTHAGLRRGLEQQKIFEEEGVDLSRVIIGHSGDSTDIGYLEELIAAGSYLGMDRFGIDAFLPFEDRVNTVAQMCERGHADKMVLSHDANCYFDALPDELVSQVMPNWHYLHIHNDVIPALKERGVTDEQLHTMLVDNPRRIFEREGAYE

SEQ ID NO: 479 - protein, 326 aa, Artificial Sequence
  Synthetic
MSELNTARGSIDTAALGVTLMHEHVFIMTTEIAENYPEAWGDEDRRVADAVKRLNELKARGVDTIVDLTVIGLGRYIPRIARVAAETELNIVVATGLYTYNDVPMYFHYLGPGGELGGPEIMTDMFVRDIEQGIADTGIKAGILKCATDTPGVTPGVERVLRAVAQAHKRTGVPISTHTHAGLRRGLEQQKIFEEEGVDLSRVIIGHSGDSTDIGYLEELIAAGSYLGMDRFGIDAFLPFEDRVNTVAQMCERGHADKMVLSHDANCYFDALPDELVSQVMPNWHYLHIHNDVIPALKERGVTDEQLHTMLVDNPRRIFERKGAYE

SEQ ID NO: 480 - protein, 326 aa, Artificial Sequence
  Synthetic
MSELNTARGSIDTAALGVTLMHEHVFIMTTEIAENYPEAWGDEDRRVADAVKRLNELKARGVDTIVDLTVIGLGRYIPRIARVAAETELNIVVATGLYTYNDVPMYFHYLGPGGELGGPEIMTDMFVRDIEQGIADTGIKAGILKCATDTPGVTPGVERVLRAVAQAHKRTGVPISTHTHAGLRRGLEQQKIFEEEGVDLSRVIIGHSGDSTDIGYLEELIAAGSYLGMDRFGIDAFLPFEDRVNTVAQMCERGHADKMVLSHDANCYFDALPDELVSQVMPNWHYLHIHNDVIPALKERGVTDEQLHTMLVDNPRRIFERRGAYE

SEQ ID NO: 481 - protein, 326 aa, Artificial Sequence
  Synthetic
MSELNTARGSIDTAALGVTLMHEHVFIMTTEIAENYPEAWGDEDRRVADAVKRLNELKARGVDTIVDLTVIGLGRYIPRIARVAAETELNIVVATGLYTYNDVPMYFHYLGPGGELGGPEIMTDMFVRDIEQGIADTGIKAGILKCATDTPGVTPGVERVLRAVAQAHKRTGVPISTHTHAGLRRGLEQQKIFEEEGVDLSRVIIGHSGDSTDIGYLEELIAAGSYLGMDRFGIDAFLPFEDRVNTVAQMCERGHADKMVLSHDANCYFDALPDELVSQVMPNWHYLHIHNDVIPALKERGVTDEQLHTMLVDNPRRIFERQGPYE

SEQ ID NO: 482 - protein, 326 aa, Artificial Sequence
  Synthetic
MSELNTARGSIDTAALGVTLMHEHVFIMTTEIAENYPEAWGDEDRRVADAVKRLNELKARGVDTIVDLTVIGLGRYIPRIARVAAETELNIVVATGLYTYNDVPMYFHYLGPGGELGGPEIMTDMFVRDIEQGIADTGIKAGILKCATDTPGVTPGVERVLRAVAQAHKRTGVPISTHTHAGLRRGLEQQKIFEEEGVDLSRVIIGHSGDSTDIGYLEELIAAGSYLGMDRFGIDAFLPFEDRVNTVAQMCERGHADKMVLSHDANCYFDALPDELVSQVMPNWHYLHIHNDVIPALKERGVTDEQLHTMLVDNPRRIFERQGSYE

SEQ ID NO: 483 - protein, 326 aa, Artificial Sequence
  Synthetic
MSELNTARGSIDTAALGVTLMHEHVFIMTTEIAENYPEAWGDEDRRVADAVKRLNELKARGVDTIVDLTVIGLGRYIPRIARVAAETELNIVVATGLYTYNDVPMYFHYLGPGGELGGPEIMTDMFVRDIEQGIADTGIKAGILKCATDTPGVTPGVERVLRAVAQAHKRTGVPISTHTHAGLRRGLEQQKIFEEEGVDLSRVIIGHSGDSTDIGYLEELIAAGSYLGMDRFGIDAFLPFEDRVNTVAQMCERGHADKMVLSHDANCYFDALPDELVSQVMPNWHYLHIHNDVIPALKERGVTDEQLHTMLVDNPRRIFERQGAFE

SEQ ID NO: 484 - protein, 326 aa, Artificial Sequence
  Synthetic
MSELNTARGSIDTAALGVTLMHEHVFIMTTEIAENYPEAWGDEDRRVADAVKRLNELKARGVDTIVDLTVIGLGRYIPRIARVAAETELNIVVATGLYTYNDVPMYFHYLGPGGELGGPEIMTDMFVRDIEQGIADTGIKAGILKCATDTPGVTPGVERVLRAVAQAHKRTGVPISTHTHAGLRRGLEQQKIFEEEGVDLSRVIIGHSGDSTDIGYLEELIAAGSYLGMDRFGIDAFLPFEDRVNTVAQMCERGHADKMVLSHDANCYFDALPDELVSQVMPNWHYLHIHNDVIPALKERGVTDEQLHTMLVDNPRRIFERQGAHE

SEQ ID NO: 485 - protein, 326 aa, Artificial Sequence
  Synthetic
MSELNTARGSIDTAALGVTLMHEHVFIMTTEIAENYPEAWGDEDRRVADAVKRLNELKARGVDTIVDLTVIGLGRYIPRIARVAAETELNIVVATGLYTYNDVPMYFHYLGPGGELGGPEIMTDMFVRDIEQGIADTGIKAGILKCATDTPGVTPGVERVLRAVAQAHKRTGVPISTHTHAGLRRGLEQQKIFEEEGVDLSRVIIGHSGDSTDIGYLEELIAAGSYLGMDRFGIDAFLPFEDRVNTVAQMCERGHADKMVLSHDANCYFDALPDELVSQVMPNWHYLHIHNDVIPALKERGVTDEQLHTMLVDNPRRIFERQGAWE

SEQ ID NO: 486 - protein, 326 aa, Artificial Sequence
  Synthetic
MSELNTARGSIDTAALGVTLMHEHVFIMTTEIAENYPEAWGDEDRRVADAVKRLNELKARGVDTIVDLTVIGLGRYIPRIARVAAETELNIVVATGLYTYNDVPMYFHYLGPGGELGGPEIMTDMFVRDIEQGIADTGIKAGILKCATDTPGVTPGVERVLRAVAQAHKRTGVPISTHTHAGLRRGLEQQKIFEEEGVDLSRVIIGHSGDSTDIGYLEELIAAGSYLGMDRFGIDAFLPFEDRVNTVAQMCERGHADKMVLSHDANCYFDALPDELVSQVMPNWHYLHIHNDVIPALKERGVTDEQLHTMLVDNPRRIFERQGAYK

SEQ ID NO: 487 - protein, 326 aa, Artificial Sequence
  Synthetic
MSELNTARGSIDTAALGVTLMHEHVFIMTTEIAENYPEAWGDEDRRVADAVKRLNELKARGVDTIVDLTVIGLGRYIPRIARVAAETELNIVVATGLYTYNDVPMYFHYLGPGGELGGPEIMTDMFVRDIEQGIADTGIKAGILKCATDTPGVTPGVERVLRAVAQAHKRTGVPISTHTHAGLRRGLEQQKIFEEEGVDLSRVIIGHSGDSTDIGYLEELIAAGSYLGMDRFGIDAFLPFEDRVNTVAQMCERGHADKMVLSHDANCYFDALPDELVSQVMPNWHYLHIHNDVIPALKERGVTDEQLHTMLVDNPRRIFERQGAYQ

SEQ ID NO: 488 - protein, 326 aa, Artificial Sequence
  Synthetic
MSELNTARGSIDTAALGVTLMHEHVFIMTTEIAENYPEAWGDEDRRVADAVKRLNELKARGVDTIVDLTVIGLGRYIPRIARVAAETELNIVVATGLYTYNDVPMYFHYLGPGGELGGPEIMTDMFVRDIEQGIADTGIKAGILKCATDTPGVTPGVERVLRAVAQAHKRTGVPISTHTHAGLRRGLEQQKIFEEEGVDLSRVIIGHSGDSTDIGYLEELIAAGSYLGMDRFGIDAFLPFEDRVNTVAQMCERGHADKMVLSHDANCYFDALPDELVSQVMPNWHYLHIHNDVIPALKERGVTDEQLHTMLVDNPRRIFERQGAYR

SEQ ID NO: 489 - protein, 327 aa, Artificial Sequence
  Synthetic
MMSELNTARGSIDTAALGVTLMHEHVFIMTTEIAENYPEAWGDEDRRVADAVKRLNELKARGVDTIVDLTVIGLGRYIPRIARVAAETELNIVVATGLYTYNDVPMYFHYLGPGGELGGPEIMTDMFVRDIEQGIADTGIKAGILKCATDTPGVTPGVERVLRAVAQAHKRTGVPISTHTHAGLRRGLEQQKIFEEEGVDLSRVIIGHSGDSTDIGYLEELIAAGSYLGMDRFGIDAFLPFEDRVNTVAQMCERGHADKMVLSHDANCYFDALPDELVSQVMPNWHYLHIHNDVIPALKERGVTDEQLHTMLVDNPRRIFERQGAYE

SEQ ID NO: 490 - protein, 326 aa, Artificial Sequence
  Synthetic
MSELNTARGPIDTADLGVTLMNEHVFIMTTEIALNYPDAWGDEEQRVADAITRLNELKSRGVDTIIDLTVIGLGRYIPRIARVAAETELNIVVATGLYTYNDIPFRFHYEGPGGLLGGPEIMTDMFVRDIEEGIADTGIKAGILKCATDEPGITPGVERVLRAVAQAHKRTGVPISTHTHAGLRRGLEQQRIFEEEGVDLTRVIIGHSGDSTDVGYLEELIAAGSYLGMDRFGLDVISPFEQRVDIVAQMCERGHADKMVLSHDANCYFDALPEELVPQMAPNWHYLHIHNDVLPALKERGVTDEQIHTMLVENPRKIFDRQGAYQ

SEQ ID NO: 491 - protein, 326 aa, Artificial Sequence
  Synthetic
MSELNTARGPIDTADLGVTLMSEHVFIMTTEIALNYPDAWGDEEQRVADAITRLNELKSRGVDTIIDLTVIGLGRYIPRIARVAAETELNIVVATGLYTYNDIPFRFHYEGPGGLLGGPEIMTDMFVRDIEEGIADTGIKAGILKCATDEPGITPGVERVLRAVAQAHKRTGVPISTHTHAGLRRGLEQQRIFEEEGVDLTRVIIGHSGDSTDVGYLEELIAAGSYLGMDRFGLDVISPFEQRVDIVAQMCERGHADKMVLSHDANCYFDALPEELVPQMAPNWHYLHIHNDVLPALKERGVTDEQIHTMLVENPRKIFDRQGAYQ

SEQ ID NO: 492 - protein, 326 aa, Artificial Sequence
  Synthetic
MSELNTARGPIDTADLGVTLMTEHVFIMTTEIALNYPDAWGDEEQRVADAITRLNELKSRGVDTIIDLTVIGLGRYIPRIARVAAETELNIVVATGLYTYNDIPFRFHYEGPGGLLGGPEIMTDMFVRDIEEGIADTGIKAGILKCATDEPGITPGVERVLRAVAQAHKRTGVPISTHTHAGLRRGLEQQRIFEEEGVDLTRVIIGHSGDSTDVGYLEELIAAGSYLGMDRFGLDVISPFEQRVDIVAQMCERGHADKMVLSHDANCYFDALPEELVPQMAPNWHYLHIHNDVLPALKERGVTDEQIHTMLVENPRKIFDRQGAYQ

SEQ ID NO: 493 - protein, 326 aa, Artificial Sequence
  Synthetic
MSELNTARGPIDTADLGVTLMHDHVFIMTTEIALNYPDAWGDEEQRVADAITRLNELKSRGVDTIIDLTVIGLGRYIPRIARVAAETELNIVVATGLYTYNDIPFRFHYEGPGGLLGGPEIMTDMFVRDIEEGIADTGIKAGILKCATDEPGITPGVERVLRAVAQAHKRTGVPISTHTHAGLRRGLEQQRIFEEEGVDLTRVIIGHSGDSTDVGYLEELIAAGSYLGMDRFGLDVISPFEQRVDIVAQMCERGHADKMVLSHDANCYFDALPEELVPQMAPNWHYLHIHNDVLPALKERGVTDEQIHTMLVENPRKIFDRQGAYQ

SEQ ID NO: 494 - protein, 326 aa, Artificial Sequence
  Synthetic
MSELNTARGPIDTADLGVTLMHENVFIMTTEIALNYPDAWGDEEQRVADAITRLNELKSRGVDTIIDLTVIGLGRYIPRIARVAAETELNIVVATGLYTYNDIPFRFHYEGPGGLLGGPEIMTDMFVRDIEEGIADTGIKAGILKCATDEPGITPGVERVLRAVAQAHKRTGVPISTHTHAGLRRGLEQQRIFEEEGVDLTRVIIGHSGDSTDVGYLEELIAAGSYLGMDRFGLDVISPFEQRVDIVAQMCERGHADKMVLSHDANCYFDALPEELVPQMAPNWHYLHIHNDVLPALKERGVTDEQIHTMLVENPRKIFDRQGAYQ

SEQ ID NO: 495 - protein, 326 aa, Artificial Sequence
  Synthetic
MSELNTARGPIDTADLGVTLMHEHAFIMTTEIALNYPDAWGDEEQRVADAITRLNELKSRGVDTIIDLTVIGLGRYIPRIARVAAETELNIVVATGLYTYNDIPFRFHYEGPGGLLGGPEIMTDMFVRDIEEGIADTGIKAGILKCATDEPGITPGVERVLRAVAQAHKRTGVPISTHTHAGLRRGLEQQRIFEEEGVDLTRVIIGHSGDSTDVGYLEELIAAGSYLGMDRFGLDVISPFEQRVDIVAQMCERGHADKMVLSHDANCYFDALPEELVPQMAPNWHYLHIHNDVLPALKERGVTDEQIHTMLVENPRKIFDRQGAYQ

SEQ ID NO: 496 - protein, 326 aa, Artificial Sequence
  Synthetic
MSELNTARGPIDTADLGVTLMHEHCFIMTTEIALNYPDAWGDEEQRVADAITRLNELKSRGVDTIIDLTVIGLGRYIPRIARVAAETELNIVVATGLYTYNDIPFRFHYEGPGGLLGGPEIMTDMFVRDIEEGIADTGIKAGILKCATDEPGITPGVERVLRAVAQAHKRTGVPISTHTHAGLRRGLEQQRIFEEEGVDLTRVIIGHSGDSTDVGYLEELIAAGSYLGMDRFGLDVISPFEQRVDIVAQMCERGHADKMVLSHDANCYFDALPEELVPQMAPNWHYLHIHNDVLPALKERGVTDEQIHTMLVENPRKIFDRQGAYQ

SEQ ID NO: 497 - protein, 326 aa, Artificial Sequence
  Synthetic
MSELNTARGPIDTADLGVTLMHEHIFIMTTEIALNYPDAWGDEEQRVADAITRLNELKSRGVDTIIDLTVIGLGRYIPRIARVAAETELNIVVATGLYTYNDIPFRFHYEGPGGLLGGPEIMTDMFVRDIEEGIADTGIKAGILKCATDEPGITPGVERVLRAVAQAHKRTGVPISTHTHAGLRRGLEQQRIFEEEGVDLTRVIIGHSGDSTDVGYLEELIAAGSYLGMDRFGLDVISPFEQRVDIVAQMCERGHADKMVLSHDANCYFDALPEELVPQMAPNWHYLHIHNDVLPALKERGVTDEQIHTMLVENPRKIFDRQGAYQ

SEQ ID NO: 498 - protein, 326 aa, Artificial Sequence
  Synthetic
MSELNTARGPIDTADLGVTLMHEHTFIMTTEIALNYPDAWGDEEQRVADAITRLNELKSRGVDTIIDLTVIGLGRYIPRIARVAAETELNIVVATGLYTYNDIPFRFHYEGPGGLLGGPEIMTDMFVRDIEEGIADTGIKAGILKCATDEPGITPGVERVLRAVAQAHKRTGVPISTHTHAGLRRGLEQQRIFEEEGVDLTRVIIGHSGDSTDVGYLEELIAAGSYLGMDRFGLDVISPFEQRVDIVAQMCERGHADKMVLSHDANCYFDALPEELVPQMAPNWHYLHIHNDVLPALKERGVTDEQIHTMLVENPRKIFDRQGAYQ

SEQ ID NO: 499 - protein, 326 aa, Artificial Sequence
  Synthetic
MSELNTARGPIDTADLGVTLMHEHVFCMTTEIALNYPDAWGDEEQRVADAITRLNELKSRGVDTIIDLTVIGLGRYIPRIARVAAETELNIVVATGLYTYNDIPFRFHYEGPGGLLGGPEIMTDMFVRDIEEGIADTGIKAGILKCATDEPGITPGVERVLRAVAQAHKRTGVPISTHTHAGLRRGLEQQRIFEEEGVDLTRVIIGHSGDSTDVGYLEELIAAGSYLGMDRFGLDVISPFEQRVDIVAQMCERGHADKMVLSHDANCYFDALPEELVPQMAPNWHYLHIHNDVLPALKERGVTDEQIHTMLVENPRKIFDRQGAYQ

SEQ ID NO: 500 - protein, 326 aa, Artificial Sequence
  Synthetic
MSELNTARGPIDTADLGVTLMHEHVFFMTTEIALNYPDAWGDEEQRVADAITRLNELKSRGVDTIIDLTVIGLGRYIPRIARVAAETELNIVVATGLYTYNDIPFRFHYEGPGGLLGGPEIMTDMFVRDIEEGIADTGIKAGILKCATDEPGITPGVERVLRAVAQAHKRTGVPISTHTHAGLRRGLEQQRIFEEEGVDLTRVIIGHSGDSTDVGYLEELIAAGSYLGMDRFGLDVISPFEQRVDIVAQMCERGHADKMVLSHDANCYFDALPEELVPQMAPNWHYLHIHNDVLPALKERGVTDEQIHTMLVENPRKIFDRQGAYQ

SEQ ID NO: 501 - protein, 326 aa, Artificial Sequence
  Synthetic
MSELNTARGPIDTADLGVTLMHEHVFLMTTEIALNYPDAWGDEEQRVADAITRLNELKSRGVDTIIDLTVIGLGRYIPRIARVAAETELNIVVATGLYTYNDIPFRFHYEGPGGLLGGPEIMTDMFVRDIEEGIADTGIKAGILKCATDEPGITPGVERVLRAVAQAHKRTGVPISTHTHAGLRRGLEQQRIFEEEGVDLTRVIIGHSGDSTDVGYLEELIAAGSYLGMDRFGLDVISPFEQRVDIVAQMCERGHADKMVLSHDANCYFDALPEELVPQMAPNWHYLHIHNDVLPALKERGVTDEQIHTMLVENPRKIFDRQGAYQ

SEQ ID NO: 502 - protein, 326 aa, Artificial Sequence
  Synthetic
MSELNTARGPIDTADLGVTLMHEHVFMMTTEIALNYPDAWGDEEQRVADAITRLNELKSRGVDTIIDLTVIGLGRYIPRIARVAAETELNIVVATGLYTYNDIPFRFHYEGPGGLLGGPEIMTDMFVRDIEEGIADTGIKAGILKCATDEPGITPGVERVLRAVAQAHKRTGVPISTHTHAGLRRGLEQQRIFEEEGVDLTRVIIGHSGDSTDVGYLEELIAAGSYLGMDRFGLDVISPFEQRVDIVAQMCERGHADKMVLSHDANCYFDALPEELVPQMAPNWHYLHIHNDVLPALKERGVTDEQIHTMLVENPRKIFDRQGAYQ

SEQ ID NO: 503 - protein, 326 aa, Artificial Sequence
  Synthetic
MSELNTARGPIDTADLGVTLMHEHVFTMTTEIALNYPDAWGDEEQRVADAITRLNELKSRGVDTIIDLTVIGLGRYIPRIARVAAETELNIVVATGLYTYNDIPFRFHYEGPGGLLGGPEIMTDMFVRDIEEGIADTGIKAGILKCATDEPGITPGVERVLRAVAQAHKRTGVPISTHTHAGLRRGLEQQRIFEEEGVDLTRVIIGHSGDSTDVGYLEELIAAGSYLGMDRFGLDVISPFEQRVDIVAQMCERGHADKMVLSHDANCYFDALPEELVPQMAPNWHYLHIHNDVLPALKERGVTDEQIHTMLVENPRKIFDRQGAYQ

SEQ ID NO: 504 - protein, 326 aa, Artificial Sequence
  Synthetic
MSELNTARGPIDTADLGVTLMHEHVFVMTTEIALNYPDAWGDEEQRVADAITRLNELKSRGVDTIIDLTVIGLGRYIPRIARVAAETELNIVVATGLYTYNDIPFRFHYEGPGGLLGGPEIMTDMFVRDIEEGIADTGIKAGILKCATDEPGITPGVERVLRAVAQAHKRTGVPISTHTHAGLRRGLEQQRIFEEEGVDLTRVIIGHSGDSTDVGYLEELIAAGSYLGMDRFGLDVISPFEQRVDIVAQMCERGHADKMVLSHDANCYFDALPEELVPQMAPNWHYLHIHNDVLPALKERGVTDEQIHTMLVENPRKIFDRQGAYQ

SEQ ID NO: 505 - protein, 326 aa, Artificial Sequence
  Synthetic
MSELNTARGPIDTADLGVTLMHEHVFWMTTEIALNYPDAWGDEEQRVADAITRLNELKSRGVDTIIDLTVIGLGRYIPRIARVAAETELNIVVATGLYTYNDIPFRFHYEGPGGLLGGPEIMTDMFVRDIEEGIADTGIKAGILKCATDEPGITPGVERVLRAVAQAHKRTGVPISTHTHAGLRRGLEQQRIFEEEGVDLTRVIIGHSGDSTDVGYLEELIAAGSYLGMDRFGLDVISPFEQRVDIVAQMCERGHADKMVLSHDANCYFDALPEELVPQMAPNWHYLHIHNDVLPALKERGVTDEQIHTMLVENPRKIFDRQGAYQ

SEQ ID NO: 506 - protein, 326 aa, Artificial Sequence
  Synthetic
MSELNTARGPIDTADLGVTLMHEHVFYMTTEIALNYPDAWGDEEQRVADAITRLNELKSRGVDTIIDLTVIGLGRYIPRIARVAAETELNIVVATGLYTYNDIPFRFHYEGPGGLLGGPEIMTDMFVRDIEEGIADTGIKAGILKCATDEPGITPGVERVLRAVAQAHKRTGVPISTHTHAGLRRGLEQQRIFEEEGVDLTRVIIGHSGDSTDVGYLEELIAAGSYLGMDRFGLDVISPFEQRVDIVAQMCERGHADKMVLSHDANCYFDALPEELVPQMAPNWHYLHIHNDVLPALKERGVTDEQIHTMLVENPRKIFDRQGAYQ

SEQ ID NO: 507 - protein, 326 aa, Artificial Sequence
  Synthetic
MSELNTARGPIDTADLGVTLMHEHVFIMTTEIALNYPDAWGDEEQRVADAITRLNELKSRGVDTIIDATVIGLGRYIPRIARVAAETELNIVVATGLYTYNDIPFRFHYEGPGGLLGGPEIMTDMFVRDIEEGIADTGIKAGILKCATDEPGITPGVERVLRAVAQAHKRTGVPISTHTHAGLRRGLEQQRIFEEEGVDLTRVIIGHSGDSTDVGYLEELIAAGSYLGMDRFGLDVISPFEQRVDIVAQMCERGHADKMVLSHDANCYFDALPEELVPQMAPNWHYLHIHNDVLPALKERGVTDEQIHTMLVENPRKIFDRQGAYQ

SEQ ID NO: 508 - protein, 326 aa, Artificial Sequence
  Synthetic
MSELNTARGPIDTADLGVTLMHEHVFIMTTEIALNYPDAWGDEEQRVADAITRLNELKSRGVDTIIDMTVIGLGRYIPRIARVAAETELNIVVATGLYTYNDIPFRFHYEGPGGLLGGPEIMTDMFVRDIEEGIADTGIKAGILKCATDEPGITPGVERVLRAVAQAHKRTGVPISTHTHAGLRRGLEQQRIFEEEGVDLTRVIIGHSGDSTDVGYLEELIAAGSYLGMDRFGLDVISPFEQRVDIVAQMCERGHADKMVLSHDANCYFDALPEELVPQMAPNWHYLHIHNDVLPALKERGVTDEQIHTMLVENPRKIFDRQGAYQ

SEQ ID NO: 509 - protein, 326 aa, Artificial Sequence
  Synthetic
MSELNTARGPIDTADLGVTLMHEHVFIMTTEIALNYPDAWGDEEQRVADAITRLNELKSRGVDTIIDNTVIGLGRYIPRIARVAAETELNIVVATGLYTYNDIPFRFHYEGPGGLLGGPEIMTDMFVRDIEEGIADTGIKAGILKCATDEPGITPGVERVLRAVAQAHKRTGVPISTHTHAGLRRGLEQQRIFEEEGVDLTRVIIGHSGDSTDVGYLEELIAAGSYLGMDRFGLDVISPFEQRVDIVAQMCERGHADKMVLSHDANCYFDALPEELVPQMAPNWHYLHIHNDVLPALKERGVTDEQIHTMLVENPRKIFDRQGAYQ

SEQ ID NO: 510 - protein, 326 aa, Artificial Sequence
  Synthetic
MSELNTARGPIDTADLGVTLMHEHVFIMTTEIALNYPDAWGDEEQRVADAITRLNELKSRGVDTIIDPTVIGLGRYIPRIARVAAETELNIVVATGLYTYNDIPFRFHYEGPGGLLGGPEIMTDMFVRDIEEGIADTGIKAGILKCATDEPGITPGVERVLRAVAQAHKRTGVPISTHTHAGLRRGLEQQRIFEEEGVDLTRVIIGHSGDSTDVGYLEELIAAGSYLGMDRFGLDVISPFEQRVDIVAQMCERGHADKMVLSHDANCYFDALPEELVPQMAPNWHYLHIHNDVLPALKERGVTDEQIHTMLVENPRKIFDRQGAYQ

SEQ ID NO: 511 - protein, 326 aa, Artificial Sequence
  Synthetic
MSELNTARGPIDTADLGVTLMHEHVFIMTTEIALNYPDAWGDEEQRVADAITRLNELKSRGVDTIIDQTVIGLGRYIPRIARVAAETELNIVVATGLYTYNDIPFRFHYEGPGGLLGGPEIMTDMFVRDIEEGIADTGIKAGILKCATDEPGITPGVERVLRAVAQAHKRTGVPISTHTHAGLRRGLEQQRIFEEEGVDLTRVIIGHSGDSTDVGYLEELIAAGSYLGMDRFGLDVISPFEQRVDIVAQMCERGHADKMVLSHDANCYFDALPEELVPQMAPNWHYLHIHNDVLPALKERGVTDEQIHTMLVENPRKIFDRQGAYQ

SEQ ID NO: 512 - protein, 326 aa, Artificial Sequence
  Synthetic
MSELNTARGPIDTADLGVTLMHEHVFIMTTEIALNYPDAWGDEEQRVADAITRLNELKSRGVDTIIDLSVIGLGRYIPRIARVAAETELNIVVATGLYTYNDIPFRFHYEGPGGLLGGPEIMTDMFVRDIEEGIADTGIKAGILKCATDEPGITPGVERVLRAVAQAHKRTGVPISTHTHAGLRRGLEQQRIFEEEGVDLTRVIIGHSGDSTDVGYLEELIAAGSYLGMDRFGLDVISPFEQRVDIVAQMCERGHADKMVLSHDANCYFDALPEELVPQMAPNWHYLHIHNDVLPALKERGVTDEQIHTMLVENPRKIFDRQGAYQ

SEQ ID NO: 513 - protein, 326 aa, Artificial Sequence
  Synthetic
MSELNTARGPIDTADLGVTLMHEHVFIMTTEIALNYPDAWGDEEQRVADAITRLNELKSRGVDTIIDLTCIGLGRYIPRIARVAAETELNIVVATGLYTYNDIPFRFHYEGPGGLLGGPEIMTDMFVRDIEEGIADTGIKAGILKCATDEPGITPGVERVLRAVAQAHKRTGVPISTHTHAGLRRGLEQQRIFEEEGVDLTRVIIGHSGDSTDVGYLEELIAAGSYLGMDRFGLDVISPFEQRVDIVAQMCERGHADKMVLSHDANCYFDALPEELVPQMAPNWHYLHIHNDVLPALKERGVTDEQIHTMLVENPRKIFDRQGAYQ

SEQ ID NO: 514 - protein, 326 aa, Artificial Sequence
  Synthetic
MSELNTARGPIDTADLGVTLMHEHVFIMTTEIALNYPDAWGDEEQRVADAITRLNELKSRGVDTIIDLTPIGLGRYIPRIARVAAETELNIVVATGLYTYNDIPFRFHYEGPGGLLGGPEIMTDMFVRDIEEGIADTGIKAGILKCATDEPGITPGVERVLRAVAQAHKRTGVPISTHTHAGLRRGLEQQRIFEEEGVDLTRVIIGHSGDSTDVGYLEELIAAGSYLGMDRFGLDVISPFEQRVDIVAQMCERGHADKMVLSHDANCYFDALPEELVPQMAPNWHYLHIHNDVLPALKERGVTDEQIHTMLVENPRKIFDRQGAYQ

SEQ ID NO: 515 - protein, 326 aa, Artificial Sequence
  Synthetic
MSELNTARGPIDTADLGVTLMHEHVFIMTTEIALNYPDAWGDEEQRVADAITRLNELKSRGVDTIIDLTVIGCGRYIPRIARVAAETELNIVVATGLYTYNDIPFRFHYEGPGGLLGGPEIMTDMFVRDIEEGIADTGIKAGILKCATDEPGITPGVERVLRAVAQAHKRTGVPISTHTHAGLRRGLEQQRIFEEEGVDLTRVIIGHSGDSTDVGYLEELIAAGSYLGMDRFGLDVISPFEQRVDIVAQMCERGHADKMVLSHDANCYFDALPEELVPQMAPNWHYLHIHNDVLPALKERGVTDEQIHTMLVENPRKIFDRQGAYQ

SEQ ID NO: 516 - protein, 326 aa, Artificial Sequence
  Synthetic
MSELNTARGPIDTADLGVTLMHEHVFIMTTEIALNYPDAWGDEEQRVADAITRLNELKSRGVDTIIDLTVIGHGRYIPRIARVAAETELNIVVATGLYTYNDIPFRFHYEGPGGLLGGPEIMTDMFVRDIEEGIADTGIKAGILKCATDEPGITPGVERVLRAVAQAHKRTGVPISTHTHAGLRRGLEQQRIFEEEGVDLTRVIIGHSGDSTDVGYLEELIAAGSYLGMDRFGLDVISPFEQRVDIVAQMCERGHADKMVLSHDANCYFDALPEELVPQMAPNWHYLHIHNDVLPALKERGVTDEQIHTMLVENPRKIFDRQGAYQ

SEQ ID NO: 517 - protein, 326 aa, Artificial Sequence
  Synthetic
MSELNTARGPIDTADLGVTLMHEHVFIMTTEIALNYPDAWGDEEQRVADAITRLNELKSRGVDTIIDLTVIGMGRYIPRIARVAAETELNIVVATGLYTYNDIPFRFHYEGPGGLLGGPEIMTDMFVRDIEEGIADTGIKAGILKCATDEPGITPGVERVLRAVAQAHKRTGVPISTHTHAGLRRGLEQQRIFEEEGVDLTRVIIGHSGDSTDVGYLEELIAAGSYLGMDRFGLDVISPFEQRVDIVAQMCERGHADKMVLSHDANCYFDALPEELVPQMAPNWHYLHIHNDVLPALKERGVTDEQIHTMLVENPRKIFDRQGAYQ

SEQ ID NO: 518 - protein, 326 aa, Artificial Sequence
  Synthetic
MSELNTARGPIDTADLGVTLMHEHVFIMTTEIALNYPDAWGDEEQRVADAITRLNELKSRGVDTIIDLTVIGVGRYIPRIARVAAETELNIVVATGLYTYNDIPFRFHYEGPGGLLGGPEIMTDMFVRDIEEGIADTGIKAGILKCATDEPGITPGVERVLRAVAQAHKRTGVPISTHTHAGLRRGLEQQRIFEEEGVDLTRVIIGHSGDSTDVGYLEELIAAGSYLGMDRFGLDVISPFEQRVDIVAQMCERGHADKMVLSHDANCYFDALPEELVPQMAPNWHYLHIHNDVLPALKERGVTDEQIHTMLVENPRKIFDRQGAYQ

SEQ ID NO: 519 - protein, 326 aa, Artificial Sequence
  Synthetic
MSELNTARGPIDTADLGVTLMHEHVFIMTTEIALNYPDAWGDEEQRVADAITRLNELKSRGVDTIIDLTVIGLGRYIPRIARVAAETELNIVVATGLCTYNDIPFRFHYEGPGGLLGGPEIMTDMFVRDIEEGIADTGIKAGILKCATDEPGITPGVERVLRAVAQAHKRTGVPISTHTHAGLRRGLEQQRIFEEEGVDLTRVIIGHSGDSTDVGYLEELIAAGSYLGMDRFGLDVISPFEQRVDIVAQMCERGHADKMVLSHDANCYFDALPEELVPQMAPNWHYLHIHNDVLPALKERGVTDEQIHTMLVENPRKIFDRQGAYQ

SEQ ID NO: 520 - protein, 326 aa, Artificial Sequence
  Synthetic
MSELNTARGPIDTADLGVTLMHEHVFIMTTEIALNYPDAWGDEEQRVADAITRLNELKSRGVDTIIDLTVIGLGRYIPRIARVAAETELNIVVATGLFTYNDIPFRFHYEGPGGLLGGPEIMTDMFVRDIEEGIADTGIKAGILKCATDEPGITPGVERVLRAVAQAHKRTGVPISTHTHAGLRRGLEQQRIFEEEGVDLTRVIIGHSGDSTDVGYLEELIAAGSYLGMDRFGLDVISPFEQRVDIVAQMCERGHADKMVLSHDANCYFDALPEELVPQMAPNWHYLHIHNDVLPALKERGVTDEQIHTMLVENPRKIFDRQGAYQ

SEQ ID NO: 521 - protein, 326 aa, Artificial Sequence
  Synthetic
MSELNTARGPIDTADLGVTLMHEHVFIMTTEIALNYPDAWGDEEQRVADAITRLNELKSRGVDTIIDLTVIGLGRYIPRIARVAAETELNIVVATGLHTYNDIPFRFHYEGPGGLLGGPEIMTDMFVRDIEEGIADTGIKAGILKCATDEPGITPGVERVLRAVAQAHKRTGVPISTHTHAGLRRGLEQQRIFEEEGVDLTRVIIGHSGDSTDVGYLEELIAAGSYLGMDRFGLDVISPFEQRVDIVAQMCERGHADKMVLSHDANCYFDALPEELVPQMAPNWHYLHIHNDVLPALKERGVTDEQIHTMLVENPRKIFDRQGAYQ

SEQ ID NO: 522 - protein, 326 aa, Artificial Sequence
  Synthetic
MSELNTARGPIDTADLGVTLMHEHVFIMTTEIALNYPDAWGDEEQRVADAITRLNELKSRGVDTIIDLTVIGLGRYIPRIARVAAETELNIVVATGLYTDNDIPFRFHYEGPGGLLGGPEIMTDMFVRDIEEGIADTGIKAGILKCATDEPGITPGVERVLRAVAQAHKRTGVPISTHTHAGLRRGLEQQRIFEEEGVDLTRVIIGHSGDSTDVGYLEELIAAGSYLGMDRFGLDVISPFEQRVDIVAQMCERGHADKMVLSHDANCYFDALPEELVPQMAPNWHYLHIHNDVLPALKERGVTDEQIHTMLVENPRKIFDRQGAYQ

SEQ ID NO: 523 - protein, 326 aa, Artificial Sequence
  Synthetic
MSELNTARGPIDTADLGVTLMHEHVFIMTTEIALNYPDAWGDEEQRVADAITRLNELKSRGVDTIIDLTVIGLGRYIPRIARVAAETELNIVVATGLYTENDIPFRFHYEGPGGLLGGPEIMTDMFVRDIEEGIADTGIKAGILKCATDEPGITPGVERVLRAVAQAHKRTGVPISTHTHAGLRRGLEQQRIFEEEGVDLTRVIIGHSGDSTDVGYLEELIAAGSYLGMDRFGLDVISPFEQRVDIVAQMCERGHADKMVLSHDANCYFDALPEELVPQMAPNWHYLHIHNDVLPALKERGVTDEQIHTMLVENPRKIFDRQGAYQ

SEQ ID NO: 524 - protein, 326 aa, Artificial Sequence
  Synthetic
MSELNTARGPIDTADLGVTLMHEHVFIMTTEIALNYPDAWGDEEQRVADAITRLNELKSRGVDTIIDLTVIGLGRYIPRIARVAAETELNIVVATGLYTHNDIPFRFHYEGPGGLLGGPEIMTDMFVRDIEEGIADTGIKAGILKCATDEPGITPGVERVLRAVAQAHKRTGVPISTHTHAGLRRGLEQQRIFEEEGVDLTRVIIGHSGDSTDVGYLEELIAAGSYLGMDRFGLDVISPFEQRVDIVAQMCERGHADKMVLSHDANCYFDALPEELVPQMAPNWHYLHIHNDVLPALKERGVTDEQIHTMLVENPRKIFDRQGAYQ

SEQ ID NO: 525 - protein, 326 aa, Artificial Sequence
  Synthetic
MSELNTARGPIDTADLGVTLMHEHVFIMTTEIALNYPDAWGDEEQRVADAITRLNELKSRGVDTIIDLTVIGLGRYIPRIARVAAETELNIVVATGLYTQNDIPFRFHYEGPGGLLGGPEIMTDMFVRDIEEGIADTGIKAGILKCATDEPGITPGVERVLRAVAQAHKRTGVPISTHTHAGLRRGLEQQRIFEEEGVDLTRVIIGHSGDSTDVGYLEELIAAGSYLGMDRFGLDVISPFEQRVDIVAQMCERGHADKMVLSHDANCYFDALPEELVPQMAPNWHYLHIHNDVLPALKERGVTDEQIHTMLVENPRKIFDRQGAYQ

SEQ ID NO: 526 - protein, 326 aa, Artificial Sequence
  Synthetic
MSELNTARGPIDTADLGVTLMHEHVFIMTTEIALNYPDAWGDEEQRVADAITRLNELKSRGVDTIIDLTVIGLGRYIPRIARVAAETELNIVVATGLYTYNDIPFRFHYEGPGGLLGGPEIMTDMFVRDIEEGIADTGIKAGIIKCATDEPGITPGVERVLRAVAQAHKRTGVPISTHTHAGLRRGLEQQRIFEEEGVDLTRVIIGHSGDSTDVGYLEELIAAGSYLGMDRFGLDVISPFEQRVDIVAQMCERGHADKMVLSHDANCYFDALPEELVPQMAPNWHYLHIHNDVLPALKERGVTDEQIHTMLVENPRKIFDRQGAYQ

SEQ ID NO: 527 - protein, 326 aa, Artificial Sequence
  Synthetic
MSELNTARGPIDTADLGVTLMHEHVFIMTTEIALNYPDAWGDEEQRVADAITRLNELKSRGVDTIIDLTVIGLGRYIPRIARVAAETELNIVVATGLYTYNDIPFRFHYEGPGGLLGGPEIMTDMFVRDIEEGIADTGIKAGILCCATDEPGITPGVERVLRAVAQAHKRTGVPISTHTHAGLRRGLEQQRIFEEEGVDLTRVIIGHSGDSTDVGYLEELIAAGSYLGMDRFGLDVISPFEQRVDIVAQMCERGHADKMVLSHDANCYFDALPEELVPQMAPNWHYLHIHNDVLPALKERGVTDEQIHTMLVENPRKIFDRQGAYQ

SEQ ID NO: 528 - protein, 326 aa, Artificial Sequence
  Synthetic
MSELNTARGPIDTADLGVTLMHEHVFIMTTEIALNYPDAWGDEEQRVADAITRLNELKSRGVDTIIDLTVIGLGRYIPRIARVAAETELNIVVATGLYTYNDIPFRFHYEGPGGLLGGPEIMTDMFVRDIEEGIADTGIKAGILECATDEPGITPGVERVLRAVAQAHKRTGVPISTHTHAGLRRGLEQQRIFEEEGVDLTRVIIGHSGDSTDVGYLEELIAAGSYLGMDRFGLDVISPFEQRVDIVAQMCERGHADKMVLSHDANCYFDALPEELVPQMAPNWHYLHIHNDVLPALKERGVTDEQIHTMLVENPRKIFDRQGAYQ

SEQ ID NO: 529 - protein, 326 aa, Artificial Sequence
  Synthetic
MSELNTARGPIDTADLGVTLMHEHVFIMTTEIALNYPDAWGDEEQRVADAITRLNELKSRGVDTIIDLTVIGLGRYIPRIARVAAETELNIVVATGLYTYNDIPFRFHYEGPGGLLGGPEIMTDMFVRDIEEGIADTGIKAGILQCATDEPGITPGVERVLRAVAQAHKRTGVPISTHTHAGLRRGLEQQRIFEEEGVDLTRVIIGHSGDSTDVGYLEELIAAGSYLGMDRFGLDVISPFEQRVDIVAQMCERGHADKMVLSHDANCYFDALPEELVPQMAPNWHYLHIHNDVLPALKERGVTDEQIHTMLVENPRKIFDRQGAYQ

SEQ ID NO: 530 - protein, 326 aa, Artificial Sequence
  Synthetic
MSELNTARGPIDTADLGVTLMHEHVFIMTTEIALNYPDAWGDEEQRVADAITRLNELKSRGVDTIIDLTVIGLGRYIPRIARVAAETELNIVVATGLYTYNDIPFRFHYEGPGGLLGGPEIMTDMFVRDIEEGIADTGIKAGILSCATDEPGITPGVERVLRAVAQAHKRTGVPISTHTHAGLRRGLEQQRIFEEEGVDLTRVIIGHSGDSTDVGYLEELIAAGSYLGMDRFGLDVISPFEQRVDIVAQMCERGHADKMVLSHDANCYFDALPEELVPQMAPNWHYLHIHNDVLPALKERGVTDEQIHTMLVENPRKIFDRQGAYQ

SEQ ID NO: 531 - protein, 326 aa, Artificial Sequence
  Synthetic
MSELNTARGPIDTADLGVTLMHEHVFIMTTEIALNYPDAWGDEEQRVADAITRLNELKSRGVDTIIDLTVIGLGRYIPRIARVAAETELNIVVATGLYTYNDIPFRFHYEGPGGLLGGPEIMTDMFVRDIEEGIADTGIKAGILTCATDEPGITPGVERVLRAVAQAHKRTGVPISTHTHAGLRRGLEQQRIFEEEGVDLTRVIIGHSGDSTDVGYLEELIAAGSYLGMDRFGLDVISPFEQRVDIVAQMCERGHADKMVLSHDANCYFDALPEELVPQMAPNWHYLHIHNDVLPALKERGVTDEQIHTMLVENPRKIFDRQGAYQ

SEQ ID NO: 532 - protein, 326 aa, Artificial Sequence
  Synthetic
MSELNTARGPIDTADLGVTLMHEHVFIMTTEIALNYPDAWGDEEQRVADAITRLNELKSRGVDTIIDLTVIGLGRYIPRIARVAAETELNIVVATGLYTYNDIPFRFHYEGPGGLLGGPEIMTDMFVRDIEEGIADTGIKAGILKIATDEPGITPGVERVLRAVAQAHKRTGVPISTHTHAGLRRGLEQQRIFEEEGVDLTRVIIGHSGDSTDVGYLEELIAAGSYLGMDRFGLDVISPFEQRVDIVAQMCERGHADKMVLSHDANCYFDALPEELVPQMAPNWHYLHIHNDVLPALKERGVTDEQIHTMLVENPRKIFDRQGAYQ

SEQ ID NO: 533 - protein, 326 aa, Artificial Sequence
  Synthetic
MSELNTARGPIDTADLGVTLMHEHVFIMTTEIALNYPDAWGDEEQRVADAITRLNELKSRGVDTIIDLTVIGLGRYIPRIARVAAETELNIVVATGLYTYNDIPFRFHYEGPGGLLGGPEIMTDMFVRDIEEGIADTGIKAGILKLATDEPGITPGVERVLRAVAQAHKRTGVPISTHTHAGLRRGLEQQRIFEEEGVDLTRVIIGHSGDSTDVGYLEELIAAGSYLGMDRFGLDVISPFEQRVDIVAQMCERGHADKMVLSHDANCYFDALPEELVPQMAPNWHYLHIHNDVLPALKERGVTDEQIHTMLVENPRKIFDRQGAYQ

SEQ ID NO: 534 - protein, 326 aa, Artificial Sequence
  Synthetic
MSELNTARGPIDTADLGVTLMHEHVFIMTTEIALNYPDAWGDEEQRVADAITRLNELKSRGVDTIIDLTVIGLGRYIPRIARVAAETELNIVVATGLYTYNDIPFRFHYEGPGGLLGGPEIMTDMFVRDIEEGIADTGIKAGILKVATDEPGITPGVERVLRAVAQAHKRTGVPISTHTHAGLRRGLEQQRIFEEEGVDLTRVIIGHSGDSTDVGYLEELIAAGSYLGMDRFGLDVISPFEQRVDIVAQMCERGHADKMVLSHDANCYFDALPEELVPQMAPNWHYLHIHNDVLPALKERGVTDEQIHTMLVENPRKIFDRQGAYQ

SEQ ID NO: 535 - protein, 326 aa, Artificial Sequence
  Synthetic
MSELNTARGPIDTADLGVTLMHEHVFIMTTEIALNYPDAWGDEEQRVADAITRLNELKSRGVDTIIDLTVIGLGRYIPRIARVAAETELNIVVATGLYTYNDIPFRFHYEGPGGLLGGPEIMTDMFVRDIEEGIADTGIKAGILKYATDEPGITPGVERVLRAVAQAHKRTGVPISTHTHAGLRRGLEQQRIFEEEGVDLTRVIIGHSGDSTDVGYLEELIAAGSYLGMDRFGLDVISPFEQRVDIVAQMCERGHADKMVLSHDANCYFDALPEELVPQMAPNWHYLHIHNDVLPALKERGVTDEQIHTMLVENPRKIFDRQGAYQ

SEQ ID NO: 536 - protein, 326 aa, Artificial Sequence
  Synthetic
MSELNTARGPIDTADLGVTLMHEHVFIMTTEIALNYPDAWGDEEQRVADAITRLNELKSRGVDTIIDLTVIGLGRYIPRIARVAAETELNIVVATGLYTYNDIPFRFHYEGPGGLLGGPEIMTDMFVRDIEEGIADTGIKAGILKCCTDEPGITPGVERVLRAVAQAHKRTGVPISTHTHAGLRRGLEQQRIFEEEGVDLTRVIIGHSGDSTDVGYLEELIAAGSYLGMDRFGLDVISPFEQRVDIVAQMCERGHADKMVLSHDANCYFDALPEELVPQMAPNWHYLHIHNDVLPALKERGVTDEQIHTMLVENPRKIFDRQGAYQ

SEQ ID NO: 537 - protein, 326 aa, Artificial Sequence
  Synthetic
MSELNTARGPIDTADLGVTLMHEHVFIMTTEIALNYPDAWGDEEQRVADAITRLNELKSRGVDTIIDLTVIGLGRYIPRIARVAAETELNIVVATGLYTYNDIPFRFHYEGPGGLLGGPEIMTDMFVRDIEEGIADTGIKAGILKCHTDEPGITPGVERVLRAVAQAHKRTGVPISTHTHAGLRRGLEQQRIFEEEGVDLTRVIIGHSGDSTDVGYLEELIAAGSYLGMDRFGLDVISPFEQRVDIVAQMCERGHADKMVLSHDANCYFDALPEELVPQMAPNWHYLHIHNDVLPALKERGVTDEQIHTMLVENPRKIFDRQGAYQ

SEQ ID NO: 538 - protein, 326 aa, Artificial Sequence
  Synthetic
MSELNTARGPIDTADLGVTLMHEHVFIMTTEIALNYPDAWGDEEQRVADAITRLNELKSRGVDTIIDLTVIGLGRYIPRIARVAAETELNIVVATGLYTYNDIPFRFHYEGPGGLLGGPEIMTDMFVRDIEEGIADTGIKAGILKCWTDEPGITPGVERVLRAVAQAHKRTGVPISTHTHAGLRRGLEQQRIFEEEGVDLTRVIIGHSGDSTDVGYLEELIAAGSYLGMDRFGLDVISPFEQRVDIVAQMCERGHADKMVLSHDANCYFDALPEELVPQMAPNWHYLHIHNDVLPALKERGVTDEQIHTMLVENPRKIFDRQGAYQ

SEQ ID NO: 539 - protein, 326 aa, Artificial Sequence
  Synthetic
MSELNTARGPIDTADLGVTLMHEHVFIMTTEIALNYPDAWGDEEQRVADAITRLNELKSRGVDTIIDLTVIGLGRYIPRIARVAAETELNIVVATGLYTYNDIPFRFHYEGPGGLLGGPEIMTDMFVRDIEEGIADTGIKAGILKCAADEPGITPGVERVLRAVAQAHKRTGVPISTHTHAGLRRGLEQQRIFEEEGVDLTRVIIGHSGDSTDVGYLEELIAAGSYLGMDRFGLDVISPFEQRVDIVAQMCERGHADKMVLSHDANCYFDALPEELVPQMAPNWHYLHIHNDVLPALKERGVTDEQIHTMLVENPRKIFDRQGAYQ

SEQ ID NO: 540 - protein, 326 aa, Artificial Sequence
  Synthetic
MSELNTARGPIDTADLGVTLMHEHVFIMTTEIALNYPDAWGDEEQRVADAITRLNELKSRGVDTIIDLTVIGLGRYIPRIARVAAETELNIVVATGLYTYNDIPFRFHYEGPGGLLGGPEIMTDMFVRDIEEGIADTGIKAGILKCAIDEPGITPGVERVLRAVAQAHKRTGVPISTHTHAGLRRGLEQQRIFEEEGVDLTRVIIGHSGDSTDVGYLEELIAAGSYLGMDRFGLDVISPFEQRVDIVAQMCERGHADKMVLSHDANCYFDALPEELVPQMAPNWHYLHIHNDVLPALKERGVTDEQIHTMLVENPRKIFDRQGAYQ

SEQ ID NO: 541 - protein, 326 aa, Artificial Sequence
  Synthetic
MSELNTARGPIDTADLGVTLMHEHVFIMTTEIALNYPDAWGDEEQRVADAITRLNELKSRGVDTIIDLTVIGLGRYIPRIARVAAETELNIVVATGLYTYNDIPFRFHYEGPGGLLGGPEIMTDMFVRDIEEGIADTGIKAGILKCAVDEPGITPGVERVLRAVAQAHKRTGVPISTHTHAGLRRGLEQQRIFEEEGVDLTRVIIGHSGDSTDVGYLEELIAAGSYLGMDRFGLDVISPFEQRVDIVAQMCERGHADKMVLSHDANCYFDALPEELVPQMAPNWHYLHIHNDVLPALKERGVTDEQIHTMLVENPRKIFDRQGAYQ

SEQ ID NO: 542 - protein, 326 aa, Artificial Sequence
  Synthetic
MSELNTARGPIDTADLGVTLMHEHVFIMTTEIALNYPDAWGDEEQRVADAITRLNELKSRGVDTIIDLTVIGLGRYIPRIARVAAETELNIVVATGLYTYNDIPFRFHYEGPGGLLGGPEIMTDMFVRDIEEGIADTGIKAGILKCAWDEPGITPGVERVLRAVAQAHKRTGVPISTHTHAGLRRGLEQQRIFEEEGVDLTRVIIGHSGDSTDVGYLEELIAAGSYLGMDRFGLDVISPFEQRVDIVAQMCERGHADKMVLSHDANCYFDALPEELVPQMAPNWHYLHIHNDVLPALKERGVTDEQIHTMLVENPRKIFDRQGAYQ

SEQ ID NO: 543 - protein, 326 aa, Artificial Sequence
  Synthetic
MSELNTARGPIDTADLGVTLMHEHVFIMTTEIALNYPDAWGDEEQRVADAITRLNELKSRGVDTIIDLTVIGLGRYIPRIARVAAETELNIVVATGLYTYNDIPFRFHYEGPGGLLGGPEIMTDMFVRDIEEGIADTGIKAGILKCAYDEPGITPGVERVLRAVAQAHKRTGVPISTHTHAGLRRGLEQQRIFEEEGVDLTRVIIGHSGDSTDVGYLEELIAAGSYLGMDRFGLDVISPFEQRVDIVAQMCERGHADKMVLSHDANCYFDALPEELVPQMAPNWHYLHIHNDVLPALKERGVTDEQIHTMLVENPRKIFDRQGAYQ

SEQ ID NO: 544 - protein, 326 aa, Artificial Sequence
  Synthetic
MSELNTARGPIDTADLGVTLMHEHVFIMTTEIALNYPDAWGDEEQRVADAITRLNELKSRGVDTIIDLTVIGLGRYIPRIARVAAETELNIVVATGLYTYNDIPFRFHYEGPGGLLGGPEIMTDMFVRDIEEGIADTGIKAGILKCATDEPGITPGVERVLRAIAQAHKRTGVPISTHTHAGLRRGLEQQRIFEEEGVDLTRVIIGHSGDSTDVGYLEELIAAGSYLGMDRFGLDVISPFEQRVDIVAQMCERGHADKMVLSHDANCYFDALPEELVPQMAPNWHYLHIHNDVLPALKERGVTDEQIHTMLVENPRKIFDRQGAYQ

SEQ ID NO: 545 - protein, 326 aa, Artificial Sequence
  Synthetic
MSELNTARGPIDTADLGVTLMHEHVFIMTTEIALNYPDAWGDEEQRVADAITRLNELKSRGVDTIIDLTVIGLGRYIPRIARVAAETELNIVVATGLYTYNDIPFRFHYEGPGGLLGGPEIMTDMFVRDIEEGIADTGIKAGILKCATDEPGITPGVERVLRAVAQAHKRTGVPICTHTHAGLRRGLEQQRIFEEEGVDLTRVIIGHSGDSTDVGYLEELIAAGSYLGMDRFGLDVISPFEQRVDIVAQMCERGHADKMVLSHDANCYFDALPEELVPQMAPNWHYLHIHNDVLPALKERGVTDEQIHTMLVENPRKIFDRQGAYQ

SEQ ID NO: 546 - protein, 326 aa, Artificial Sequence
  Synthetic
MSELNTARGPIDTADLGVTLMHEHVFIMTTEIALNYPDAWGDEEQRVADAITRLNELKSRGVDTIIDLTVIGLGRYIPRIARVAAETELNIVVATGLYTYNDIPFRFHYEGPGGLLGGPEIMTDMFVRDIEEGIADTGIKAGILKCATDEPGITPGVERVLRAVAQAHKRTGVPIFTHTHAGLRRGLEQQRIFEEEGVDLTRVIIGHSGDSTDVGYLEELIAAGSYLGMDRFGLDVISPFEQRVDIVAQMCERGHADKMVLSHDANCYFDALPEELVPQMAPNWHYLHIHNDVLPALKERGVTDEQIHTMLVENPRKIFDRQGAYQ

SEQ ID NO: 547 - protein, 326 aa, Artificial Sequence
  Synthetic
MSELNTARGPIDTADLGVTLMHEHVFIMTTEIALNYPDAWGDEEQRVADAITRLNELKSRGVDTIIDLTVIGLGRYIPRIARVAAETELNIVVATGLYTYNDIPFRFHYEGPGGLLGGPEIMTDMFVRDIEEGIADTGIKAGILKCATDEPGITPGVERVLRAVAQAHKRTGVPIHTHTHAGLRRGLEQQRIFEEEGVDLTRVIIGHSGDSTDVGYLEELIAAGSYLGMDRFGLDVISPFEQRVDIVAQMCERGHADKMVLSHDANCYFDALPEELVPQMAPNWHYLHIHNDVLPALKERGVTDEQIHTMLVENPRKIFDRQGAYQ

SEQ ID NO: 548 - protein, 326 aa, Artificial Sequence
  Synthetic
MSELNTARGPIDTADLGVTLMHEHVFIMTTEIALNYPDAWGDEEQRVADAITRLNELKSRGVDTIIDLTVIGLGRYIPRIARVAAETELNIVVATGLYTYNDIPFRFHYEGPGGLLGGPEIMTDMFVRDIEEGIADTGIKAGILKCATDEPGITPGVERVLRAVAQAHKRTGVPIITHTHAGLRRGLEQQRIFEEEGVDLTRVIIGHSGDSTDVGYLEELIAAGSYLGMDRFGLDVISPFEQRVDIVAQMCERGHADKMVLSHDANCYFDALPEELVPQMAPNWHYLHIHNDVLPALKERGVTDEQIHTMLVENPRKIFDRQGAYQ

SEQ ID NO: 549 - protein, 326 aa, Artificial Sequence
  Synthetic
MSELNTARGPIDTADLGVTLMHEHVFIMTTEIALNYPDAWGDEEQRVADAITRLNELKSRGVDTIIDLTVIGLGRYIPRIARVAAETELNIVVATGLYTYNDIPFRFHYEGPGGLLGGPEIMTDMFVRDIEEGIADTGIKAGILKCATDEPGITPGVERVLRAVAQAHKRTGVPILTHTHAGLRRGLEQQRIFEEEGVDLTRVIIGHSGDSTDVGYLEELIAAGSYLGMDRFGLDVISPFEQRVDIVAQMCERGHADKMVLSHDANCYFDALPEELVPQMAPNWHYLHIHNDVLPALKERGVTDEQIHTMLVENPRKIFDRQGAYQ

SEQ ID NO: 550 - protein, 326 aa, Artificial Sequence
  Synthetic
MSELNTARGPIDTADLGVTLMHEHVFIMTTEIALNYPDAWGDEEQRVADAITRLNELKSRGVDTIIDLTVIGLGRYIPRIARVAAETELNIVVATGLYTYNDIPFRFHYEGPGGLLGGPEIMTDMFVRDIEEGIADTGIKAGILKCATDEPGITPGVERVLRAVAQAHKRTGVPIVTHTHAGLRRGLEQQRIFEEEGVDLTRVIIGHSGDSTDVGYLEELIAAGSYLGMDRFGLDVISPFEQRVDIVAQMCERGHADKMVLSHDANCYFDALPEELVPQMAPNWHYLHIHNDVLPALKERGVTDEQIHTMLVENPRKIFDRQGAYQ

SEQ ID NO: 551 - protein, 326 aa, Artificial Sequence
  Synthetic
MSELNTARGPIDTADLGVTLMHEHVFIMTTEIALNYPDAWGDEEQRVADAITRLNELKSRGVDTIIDLTVIGLGRYIPRIARVAAETELNIVVATGLYTYNDIPFRFHYEGPGGLLGGPEIMTDMFVRDIEEGIADTGIKAGILKCATDEPGITPGVERVLRAVAQAHKRTGVPIWTHTHAGLRRGLEQQRIFEEEGVDLTRVIIGHSGDSTDVGYLEELIAAGSYLGMDRFGLDVISPFEQRVDIVAQMCERGHADKMVLSHDANCYFDALPEELVPQMAPNWHYLHIHNDVLPALKERGVTDEQIHTMLVENPRKIFDRQGAYQ

SEQ ID NO: 552 - protein, 326 aa, Artificial Sequence
  Synthetic
MSELNTARGPIDTADLGVTLMHEHVFIMTTEIALNYPDAWGDEEQRVADAITRLNELKSRGVDTIIDLTVIGLGRYIPRIARVAAETELNIVVATGLYTYNDIPFRFHYEGPGGLLGGPEIMTDMFVRDIEEGIADTGIKAGILKCATDEPGITPGVERVLRAVAQAHKRTGVPIYTHTHAGLRRGLEQQRIFEEEGVDLTRVIIGHSGDSTDVGYLEELIAAGSYLGMDRFGLDVISPFEQRVDIVAQMCERGHADKMVLSHDANCYFDALPEELVPQMAPNWHYLHIHNDVLPALKERGVTDEQIHTMLVENPRKIFDRQGAYQ

SEQ ID NO: 553 - protein, 326 aa, Artificial Sequence
  Synthetic
MSELNTARGPIDTADLGVTLMHEHVFIMTTEIALNYPDAWGDEEQRVADAITRLNELKSRGVDTIIDLTVIGLGRYIPRIARVAAETELNIVVATGLYTYNDIPFRFHYEGPGGLLGGPEIMTDMFVRDIEEGIADTGIKAGILKCATDEPGITPGVERVLRAVAQAHKRTGVPISCHTHAGLRRGLEQQRIFEEEGVDLTRVIIGHSGDSTDVGYLEELIAAGSYLGMDRFGLDVISPFEQRVDIVAQMCERGHADKMVLSHDANCYFDALPEELVPQMAPNWHYLHIHNDVLPALKERGVTDEQIHTMLVENPRKIFDRQGAYQ

SEQ ID NO: 554 - protein, 326 aa, Artificial Sequence
  Synthetic
MSELNTARGPIDTADLGVTLMHEHVFIMTTEIALNYPDAWGDEEQRVADAITRLNELKSRGVDTIIDLTVIGLGRYIPRIARVAAETELNIVVATGLYTYNDIPFRFHYEGPGGLLGGPEIMTDMFVRDIEEGIADTGIKAGILKCATDEPGITPGVERVLRAVAQAHKRTGVPISTATHAGLRRGLEQQRIFEEEGVDLTRVIIGHSGDSTDVGYLEELIAAGSYLGMDRFGLDVISPFEQRVDIVAQMCERGHADKMVLSHDANCYFDALPEELVPQMAPNWHYLHIHNDVLPALKERGVTDEQIHTMLVENPRKIFDRQGAYQ

SEQ ID NO: 555 - protein, 326 aa, Artificial Sequence
  Synthetic
MSELNTARGPIDTADLGVTLMHEHVFIMTTEIALNYPDAWGDEEQRVADAITRLNELKSRGVDTIIDLTVIGLGRYIPRIARVAAETELNIVVATGLYTYNDIPFRFHYEGPGGLLGGPEIMTDMFVRDIEEGIADTGIKAGILKCATDEPGITPGVERVLRAVAQAHKRTGVPISTDTHAGLRRGLEQQRIFEEEGVDLTRVIIGHSGDSTDVGYLEELIAAGSYLGMDRFGLDVISPFEQRVDIVAQMCERGHADKMVLSHDANCYFDALPEELVPQMAPNWHYLHIHNDVLPALKERGVTDEQIHTMLVENPRKIFDRQGAYQ

SEQ ID NO: 556 - protein, 326 aa, Artificial Sequence
  Synthetic
MSELNTARGPIDTADLGVTLMHEHVFIMTTEIALNYPDAWGDEEQRVADAITRLNELKSRGVDTIIDLTVIGLGRYIPRIARVAAETELNIVVATGLYTYNDIPFRFHYEGPGGLLGGPEIMTDMFVRDIEEGIADTGIKAGILKCATDEPGITPGVERVLRAVAQAHKRTGVPISTRTHAGLRRGLEQQRIFEEEGVDLTRVIIGHSGDSTDVGYLEELIAAGSYLGMDRFGLDVISPFEQRVDIVAQMCERGHADKMVLSHDANCYFDALPEELVPQMAPNWHYLHIHNDVLPALKERGVTDEQIHTMLVENPRKIFDRQGAYQ

SEQ ID NO: 557 - protein, 326 aa, Artificial Sequence
  Synthetic
MSELNTARGPIDTADLGVTLMHEHVFIMTTEIALNYPDAWGDEEQRVADAITRLNELKSRGVDTIIDLTVIGLGRYIPRIARVAAETELNIVVATGLYTYNDIPFRFHYEGPGGLLGGPEIMTDMFVRDIEEGIADTGIKAGILKCATDEPGITPGVERVLRAVAQAHKRTGVPISTSTHAGLRRGLEQQRIFEEEGVDLTRVIIGHSGDSTDVGYLEELIAAGSYLGMDRFGLDVISPFEQRVDIVAQMCERGHADKMVLSHDANCYFDALPEELVPQMAPNWHYLHIHNDVLPALKERGVTDEQIHTMLVENPRKIFDRQGAYQ

SEQ ID NO: 558 - protein, 326 aa, Artificial Sequence
  Synthetic
MSELNTARGPIDTADLGVTLMHEHVFIMTTEIALNYPDAWGDEEQRVADAITRLNELKSRGVDTIIDLTVIGLGRYIPRIARVAAETELNIVVATGLYTYNDIPFRFHYEGPGGLLGGPEIMTDMFVRDIEEGIADTGIKAGILKCATDEPGITPGVERVLRAVAQAHKRTGVPISTTTHAGLRRGLEQQRIFEEEGVDLTRVIIGHSGDSTDVGYLEELIAAGSYLGMDRFGLDVISPFEQRVDIVAQMCERGHADKMVLSHDANCYFDALPEELVPQMAPNWHYLHIHNDVLPALKERGVTDEQIHTMLVENPRKIFDRQGAYQ

SEQ ID NO: 559 - protein, 326 aa, Artificial Sequence
  Synthetic
MSELNTARGPIDTADLGVTLMHEHVFIMTTEIALNYPDAWGDEEQRVADAITRLNELKSRGVDTIIDLTVIGLGRYIPRIARVAAETELNIVVATGLYTYNDIPFRFHYEGPGGLLGGPEIMTDMFVRDIEEGIADTGIKAGILKCATDEPGITPGVERVLRAVAQAHKRTGVPISTHCHAGLRRGLEQQRIFEEEGVDLTRVIIGHSGDSTDVGYLEELIAAGSYLGMDRFGLDVISPFEQRVDIVAQMCERGHADKMVLSHDANCYFDALPEELVPQMAPNWHYLHIHNDVLPALKERGVTDEQIHTMLVENPRKIFDRQGAYQ

SEQ ID NO: 560 - protein, 326 aa, Artificial Sequence
  Synthetic
MSELNTARGPIDTADLGVTLMHEHVFIMTTEIALNYPDAWGDEEQRVADAITRLNELKSRGVDTIIDLTVIGLGRYIPRIARVAAETELNIVVATGLYTYNDIPFRFHYEGPGGLLGGPEIMTDMFVRDIEEGIADTGIKAGILKCATDEPGITPGVERVLRAVAQAHKRTGVPISTHFHAGLRRGLEQQRIFEEEGVDLTRVIIGHSGDSTDVGYLEELIAAGSYLGMDRFGLDVISPFEQRVDIVAQMCERGHADKMVLSHDANCYFDALPEELVPQMAPNWHYLHIHNDVLPALKERGVTDEQIHTMLVENPRKIFDRQGAYQ

SEQ ID NO: 561 - protein, 326 aa, Artificial Sequence
  Synthetic
MSELNTARGPIDTADLGVTLMHEHVFIMTTEIALNYPDAWGDEEQRVADAITRLNELKSRGVDTIIDLTVIGLGRYIPRIARVAAETELNIVVATGLYTYNDIPFRFHYEGPGGLLGGPEIMTDMFVRDIEEGIADTGIKAGILKCATDEPGITPGVERVLRAVAQAHKRTGVPISTHMHAGLRRGLEQQRIFEEEGVDLTRVIIGHSGDSTDVGYLEELIAAGSYLGMDRFGLDVISPFEQRVDIVAQMCERGHADKMVLSHDANCYFDALPEELVPQMAPNWHYLHIHNDVLPALKERGVTDEQIHTMLVENPRKIFDRQGAYQ

SEQ ID NO: 562 - protein, 326 aa, Artificial Sequence
  Synthetic
MSELNTARGPIDTADLGVTLMHEHVFIMTTEIALNYPDAWGDEEQRVADAITRLNELKSRGVDTIIDLTVIGLGRYIPRIARVAAETELNIVVATGLYTYNDIPFRFHYEGPGGLLGGPEIMTDMFVRDIEEGIADTGIKAGILKCATDEPGITPGVERVLRAVAQAHKRTGVPISTHTHCGLRRGLEQQRIFEEEGVDLTRVIIGHSGDSTDVGYLEELIAAGSYLGMDRFGLDVISPFEQRVDIVAQMCERGHADKMVLSHDANCYFDALPEELVPQMAPNWHYLHIHNDVLPALKERGVTDEQIHTMLVENPRKIFDRQGAYQ

SEQ ID NO: 563 - protein, 326 aa, Artificial Sequence
  Synthetic
MSELNTARGPIDTADLGVTLMHEHVFIMTTEIALNYPDAWGDEEQRVADAITRLNELKSRGVDTIIDLTVIGLGRYIPRIARVAAETELNIVVATGLYTYNDIPFRFHYEGPGGLLGGPEIMTDMFVRDIEEGIADTGIKAGILKCATDEPGITPGVERVLRAVAQAHKRTGVPISTHTHRGLRRGLEQQRIFEEEGVDLTRVIIGHSGDSTDVGYLEELIAAGSYLGMDRFGLDVISPFEQRVDIVAQMCERGHADKMVLSHDANCYFDALPEELVPQMAPNWHYLHIHNDVLPALKERGVTDEQIHTMLVENPRKIFDRQGAYQ

SEQ ID NO: 564 - protein, 326 aa, Artificial Sequence
  Synthetic
MSELNTARGPIDTADLGVTLMHEHVFIMTTEIALNYPDAWGDEEQRVADAITRLNELKSRGVDTIIDLTVIGLGRYIPRIARVAAETELNIVVATGLYTYNDIPFRFHYEGPGGLLGGPEIMTDMFVRDIEEGIADTGIKAGILKCATDEPGITPGVERVLRAVAQAHKRTGVPISTHTHSGLRRGLEQQRIFEEEGVDLTRVIIGHSGDSTDVGYLEELIAAGSYLGMDRFGLDVISPFEQRVDIVAQMCERGHADKMVLSHDANCYFDALPEELVPQMAPNWHYLHIHNDVLPALKERGVTDEQIHTMLVENPRKIFDRQGAYQ

SEQ ID NO: 565 - protein, 326 aa, Artificial Sequence
  Synthetic
MSELNTARGPIDTADLGVTLMHEHVFIMTTEIALNYPDAWGDEEQRVADAITRLNELKSRGVDTIIDLTVIGLGRYIPRIARVAAETELNIVVATGLYTYNDIPFRFHYEGPGGLLGGPEIMTDMFVRDIEEGIADTGIKAGILKCATDEPGITPGVERVLRAVAQAHKRTGVPISTHTHAGLRRGLEAQRIFEEEGVDLTRVIIGHSGDSTDVGYLEELIAAGSYLGMDRFGLDVISPFEQRVDIVAQMCERGHADKMVLSHDANCYFDALPEELVPQMAPNWHYLHIHNDVLPALKERGVTDEQIHTMLVENPRKIFDRQGAYQ

SEQ ID NO: 566 - protein, 326 aa, Artificial Sequence
  Synthetic
MSELNTARGPIDTADLGVTLMHEHVFIMTTEIALNYPDAWGDEEQRVADAITRLNELKSRGVDTIIDLTVIGLGRYIPRIARVAAETELNIVVATGLYTYNDIPFRFHYEGPGGLLGGPEIMTDMFVRDIEEGIADTGIKAGILKCATDEPGITPGVERVLRAVAQAHKRTGVPISTHTHAGLRRGLECQRIFEEEGVDLTRVIIGHSGDSTDVGYLEELIAAGSYLGMDRFGLDVISPFEQRVDIVAQMCERGHADKMVLSHDANCYFDALPEELVPQMAPNWHYLHIHNDVLPALKERGVTDEQIHTMLVENPRKIFDRQGAYQ

SEQ ID NO: 567 - protein, 326 aa, Artificial Sequence
  Synthetic
MSELNTARGPIDTADLGVTLMHEHVFIMTTEIALNYPDAWGDEEQRVADAITRLNELKSRGVDTIIDLTVIGLGRYIPRIARVAAETELNIVVATGLYTYNDIPFRFHYEGPGGLLGGPEIMTDMFVRDIEEGIADTGIKAGILKCATDEPGITPGVERVLRAVAQAHKRTGVPISTHTHAGLRRGLEEQRIFEEEGVDLTRVIIGHSGDSTDVGYLEELIAAGSYLGMDRFGLDVISPFEQRVDIVAQMCERGHADKMVLSHDANCYFDALPEELVPQMAPNWHYLHIHNDVLPALKERGVTDEQIHTMLVENPRKIFDRQGAYQ

SEQ ID NO: 568 - protein, 326 aa, Artificial Sequence
  Synthetic
MSELNTARGPIDTADLGVTLMHEHVFIMTTEIALNYPDAWGDEEQRVADAITRLNELKSRGVDTIIDLTVIGLGRYIPRIARVAAETELNIVVATGLYTYNDIPFRFHYEGPGGLLGGPEIMTDMFVRDIEEGIADTGIKAGILKCATDEPGITPGVERVLRAVAQAHKRTGVPISTHTHAGLRRGLEIQRIFEEEGVDLTRVIIGHSGDSTDVGYLEELIAAGSYLGMDRFGLDVISPFEQRVDIVAQMCERGHADKMVLSHDANCYFDALPEELVPQMAPNWHYLHIHNDVLPALKERGVTDEQIHTMLVENPRKIFDRQGAYQ

SEQ ID NO: 569 - protein, 326 aa, Artificial Sequence
  Synthetic
MSELNTARGPIDTADLGVTLMHEHVFIMTTEIALNYPDAWGDEEQRVADAITRLNELKSRGVDTIIDLTVIGLGRYIPRIARVAAETELNIVVATGLYTYNDIPFRFHYEGPGGLLGGPEIMTDMFVRDIEEGIADTGIKAGILKCATDEPGITPGVERVLRAVAQAHKRTGVPISTHTHAGLRRGLELQRIFEEEGVDLTRVIIGHSGDSTDVGYLEELIAAGSYLGMDRFGLDVISPFEQRVDIVAQMCERGHADKMVLSHDANCYFDALPEELVPQMAPNWHYLHIHNDVLPALKERGVTDEQIHTMLVENPRKIFDRQGAYQ

SEQ ID NO: 570 - protein, 326 aa, Artificial Sequence
  Synthetic
MSELNTARGPIDTADLGVTLMHEHVFIMTTEIALNYPDAWGDEEQRVADAITRLNELKSRGVDTIIDLTVIGLGRYIPRIARVAAETELNIVVATGLYTYNDIPFRFHYEGPGGLLGGPEIMTDMFVRDIEEGIADTGIKAGILKCATDEPGITPGVERVLRAVAQAHKRTGVPISTHTHAGLRRGLEMQRIFEEEGVDLTRVIIGHSGDSTDVGYLEELIAAGSYLGMDRFGLDVISPFEQRVDIVAQMCERGHADKMVLSHDANCYFDALPEELVPQMAPNWHYLHIHNDVLPALKERGVTDEQIHTMLVENPRKIFDRQGAYQ

SEQ ID NO: 571 - protein, 326 aa, Artificial Sequence
  Synthetic
MSELNTARGPIDTADLGVTLMHEHVFIMTTEIALNYPDAWGDEEQRVADAITRLNELKSRGVDTIIDLTVIGLGRYIPRIARVAAETELNIVVATGLYTYNDIPFRFHYEGPGGLLGGPEIMTDMFVRDIEEGIADTGIKAGILKCATDEPGITPGVERVLRAVAQAHKRTGVPISTHTHAGLRRGLEVQRIFEEEGVDLTRVIIGHSGDSTDVGYLEELIAAGSYLGMDRFGLDVISPFEQRVDIVAQMCERGHADKMVLSHDANCYFDALPEELVPQMAPNWHYLHIHNDVLPALKERGVTDEQIHTMLVENPRKIFDRQGAYQ

SEQ ID NO: 572 - protein, 326 aa, Artificial Sequence
  Synthetic
MSELNTARGPIDTADLGVTLMHEHVFIMTTEIALNYPDAWGDEEQRVADAITRLNELKSRGVDTIIDLTVIGLGRYIPRIARVAAETELNIVVATGLYTYNDIPFRFHYEGPGGLLGGPEIMTDMFVRDIEEGIADTGIKAGILKCATDEPGITPGVERVLRAVAQAHKRTGVPISTHTHAGLRRGLEQQRIFEEEGVDLTRVIINHSGDSTDVGYLEELIAAGSYLGMDRFGLDVISPFEQRVDIVAQMCERGHADKMVLSHDANCYFDALPEELVPQMAPNWHYLHIHNDVLPALKERGVTDEQIHTMLVENPRKIFDRQGAYQ

SEQ ID NO: 573 - protein, 326 aa, Artificial Sequence
  Synthetic
MSELNTARGPIDTADLGVTLMHEHVFIMTTEIALNYPDAWGDEEQRVADAITRLNELKSRGVDTIIDLTVIGLGRYIPRIARVAAETELNIVVATGLYTYNDIPFRFHYEGPGGLLGGPEIMTDMFVRDIEEGIADTGIKAGILKCATDEPGITPGVERVLRAVAQAHKRTGVPISTHTHAGLRRGLEQQRIFEEEGVDLTRVIISHSGDSTDVGYLEELIAAGSYLGMDRFGLDVISPFEQRVDIVAQMCERGHADKMVLSHDANCYFDALPEELVPQMAPNWHYLHIHNDVLPALKERGVTDEQIHTMLVENPRKIFDRQGAYQ

SEQ ID NO: 574 - protein, 326 aa, Artificial Sequence
  Synthetic
MSELNTARGPIDTADLGVTLMHEHVFIMTTEIALNYPDAWGDEEQRVADAITRLNELKSRGVDTIIDLTVIGLGRYIPRIARVAAETELNIVVATGLYTYNDIPFRFHYEGPGGLLGGPEIMTDMFVRDIEEGIADTGIKAGILKCATDEPGITPGVERVLRAVAQAHKRTGVPISTHTHAGLRRGLEQQRIFEEEGVDLTRVIIGMSGDSTDVGYLEELIAAGSYLGMDRFGLDVISPFEQRVDIVAQMCERGHADKMVLSHDANCYFDALPEELVPQMAPNWHYLHIHNDVLPALKERGVTDEQIHTMLVENPRKIFDRQGAYQ

SEQ ID NO: 575 - protein, 326 aa, Artificial Sequence
  Synthetic
MSELNTARGPIDTADLGVTLMHEHVFIMTTEIALNYPDAWGDEEQRVADAITRLNELKSRGVDTIIDLTVIGLGRYIPRIARVAAETELNIVVATGLYTYNDIPFRFHYEGPGGLLGGPEIMTDMFVRDIEEGIADTGIKAGILKCATDEPGITPGVERVLRAVAQAHKRTGVPISTHTHAGLRRGLEQQRIFEEEGVDLTRVIIGNSGDSTDVGYLEELIAAGSYLGMDRFGLDVISPFEQRVDIVAQMCERGHADKMVLSHDANCYFDALPEELVPQMAPNWHYLHIHNDVLPALKERGVTDEQIHTMLVENPRKIFDRQGAYQ

SEQ ID NO: 576 - protein, 326 aa, Artificial Sequence
  Synthetic
MSELNTARGPIDTADLGVTLMHEHVFIMTTEIALNYPDAWGDEEQRVADAITRLNELKSRGVDTIIDLTVIGLGRYIPRIARVAAETELNIVVATGLYTYNDIPFRFHYEGPGGLLGGPEIMTDMFVRDIEEGIADTGIKAGILKCATDEPGITPGVERVLRAVAQAHKRTGVPISTHTHAGLRRGLEQQRIFEEEGVDLTRVIIGHAGDSTDVGYLEELIAAGSYLGMDRFGLDVISPFEQRVDIVAQMCERGHADKMVLSHDANCYFDALPEELVPQMAPNWHYLHIHNDVLPALKERGVTDEQIHTMLVENPRKIFDRQGAYQ

SEQ ID NO: 577 - protein, 326 aa, Artificial Sequence
  Synthetic
MSELNTARGPIDTADLGVTLMHEHVFIMTTEIALNYPDAWGDEEQRVADAITRLNELKSRGVDTIIDLTVIGLGRYIPRIARVAAETELNIVVATGLYTYNDIPFRFHYEGPGGLLGGPEIMTDMFVRDIEEGIADTGIKAGILKCATDEPGITPGVERVLRAVAQAHKRTGVPISTHTHAGLRRGLEQQRIFEEEGVDLTRVIIGHCGDSTDVGYLEELIAAGSYLGMDRFGLDVISPFEQRVDIVAQMCERGHADKMVLSHDANCYFDALPEELVPQMAPNWHYLHIHNDVLPALKERGVTDEQIHTMLVENPRKIFDRQGAYQ

SEQ ID NO: 578 - protein, 326 aa, Artificial Sequence
  Synthetic
MSELNTARGPIDTADLGVTLMHEHVFIMTTEIALNYPDAWGDEEQRVADAITRLNELKSRGVDTIIDLTVIGLGRYIPRIARVAAETELNIVVATGLYTYNDIPFRFHYEGPGGLLGGPEIMTDMFVRDIEEGIADTGIKAGILKCATDEPGITPGVERVLRAVAQAHKRTGVPISTHTHAGLRRGLEQQRIFEEEGVDLTRVIIGHTGDSTDVGYLEELIAAGSYLGMDRFGLDVISPFEQRVDIVAQMCERGHADKMVLSHDANCYFDALPEELVPQMAPNWHYLHIHNDVLPALKERGVTDEQIHTMLVENPRKIFDRQGAYQ

SEQ ID NO: 579 - protein, 326 aa, Artificial Sequence
  Synthetic
MSELNTARGPIDTADLGVTLMHEHVFIMTTEIALNYPDAWGDEEQRVADAITRLNELKSRGVDTIIDLTVIGLGRYIPRIARVAAETELNIVVATGLYTYNDIPFRFHYEGPGGLLGGPEIMTDMFVRDIEEGIADTGIKAGILKCATDEPGITPGVERVLRAVAQAHKRTGVPISTHTHAGLRRGLEQQRIFEEEGVDLTRVIIGHSNDSTDVGYLEELIAAGSYLGMDRFGLDVISPFEQRVDIVAQMCERGHADKMVLSHDANCYFDALPEELVPQMAPNWHYLHIHNDVLPALKERGVTDEQIHTMLVENPRKIFDRQGAYQ

SEQ ID NO: 580 - protein, 326 aa, Artificial Sequence
  Synthetic
MSELNTARGPIDTADLGVTLMHEHVFIMTTEIALNYPDAWGDEEQRVADAITRLNELKSRGVDTIIDLTVIGLGRYIPRIARVAAETELNIVVATGLYTYNDIPFRFHYEGPGGLLGGPEIMTDMFVRDIEEGIADTGIKAGILKCATDEPGITPGVERVLRAVAQAHKRTGVPISTHTHAGLRRGLEQQRIFEEEGVDLTRVIIGHSGCSTDVGYLEELIAAGSYLGMDRFGLDVISPFEQRVDIVAQMCERGHADKMVLSHDANCYFDALPEELVPQMAPNWHYLHIHNDVLPALKERGVTDEQIHTMLVENPRKIFDRQGAYQ

SEQ ID NO: 581 - protein, 326 aa, Artificial Sequence
  Synthetic
MSELNTARGPIDTADLGVTLMHEHVFIMTTEIALNYPDAWGDEEQRVADAITRLNELKSRGVDTIIDLTVIGLGRYIPRIARVAAETELNIVVATGLYTYNDIPFRFHYEGPGGLLGGPEIMTDMFVRDIEEGIADTGIKAGILKCATDEPGITPGVERVLRAVAQAHKRTGVPISTHTHAGLRRGLEQQRIFEEEGVDLTRVIIGHSGESTDVGYLEELIAAGSYLGMDRFGLDVISPFEQRVDIVAQMCERGHADKMVLSHDANCYFDALPEELVPQMAPNWHYLHIHNDVLPALKERGVTDEQIHTMLVENPRKIFDRQGAYQ

SEQ ID NO: 582 - protein, 326 aa, Artificial Sequence
  Synthetic
MSELNTARGAIDTTDLGVTLMHEHVFIMTTEIALNYPEAWGDEDKRVADAVSRLNELKARGVDTIVDLTVIGLGRYIPRIARVAAATELNIVVATGLYTYNDVPFRFHYEGPGGMLDGPEIMTEMFVRDIEQGIADTGVKAGILKCATDEPGITPGVERVLRAVAQAHKRTGVPISTHTHAGLRRGLEQQRIFEEEGVDLTRVVIGHSGHSTDIGYLEELIAAGSYLGMDRFGLDVISPFEERVKIVAQMCERGHADKMVLSHDANCYFDALPEELVPQMAPNWHYLHIHNDVIPALKERGVTDEQLKTMLVDNPRRIFERQGAYE

SEQ ID NO: 583 - protein, 326 aa, Artificial Sequence
  Synthetic
MSELNTARGPIDTADLGVTLMHEHVFIMTTEIALNYPDAWGDEEQRVADAITRLNELKSRGVDTIIDLTVIGLGRYIPRIARVAAETELNIVVATGLYTYNDIPFRFHYEGPGGLLGGPEIMTDMFVRDIEEGIADTGIKAGILKCATDEPGITPGVERVLRAVAQAHKRTGVPISTHTHAGLRRGLEQQRIFEEEGVDLTRVIIGHSGPSTDVGYLEELIAAGSYLGMDRFGLDVISPFEQRVDIVAQMCERGHADKMVLSHDANCYFDALPEELVPQMAPNWHYLHIHNDVLPALKERGVTDEQIHTMLVENPRKIFDRQGAYQ

SEQ ID NO: 584 - protein, 326 aa, Artificial Sequence
  Synthetic
MSELNTARGPIDTADLGVTLMHEHVFIMTTEIALNYPDAWGDEEQRVADAITRLNELKSRGVDTIIDLTVIGLGRYIPRIARVAAETELNIVVATGLYTYNDIPFRFHYEGPGGLLGGPEIMTDMFVRDIEEGIADTGIKAGILKCATDEPGITPGVERVLRAVAQAHKRTGVPISTHTHAGLRRGLEQQRIFEEEGVDLTRVIIGHSGWSTDVGYLEELIAAGSYLGMDRFGLDVISPFEQRVDIVAQMCERGHADKMVLSHDANCYFDALPEELVPQMAPNWHYLHIHNDVLPALKERGVTDEQIHTMLVENPRKIFDRQGAYQ

SEQ ID NO: 585 - protein, 326 aa, Artificial Sequence
  Synthetic
MSELNTARGPIDTADLGVTLMHEHVFIMTTEIALNYPDAWGDEEQRVADAITRLNELKSRGVDTIIDLTVIGLGRYIPRIARVAAETELNIVVATGLYTYNDIPFRFHYEGPGGLLGGPEIMTDMFVRDIEEGIADTGIKAGILKCATDEPGITPGVERVLRAVAQAHKRTGVPISTHTHAGLRRGLEQQRIFEEEGVDLTRVIIGHSGDSTDVGYLEELIAAGSYLCMDRFGLDVISPFEQRVDIVAQMCERGHADKMVLSHDANCYFDALPEELVPQMAPNWHYLHIHNDVLPALKERGVTDEQIHTMLVENPRKIFDRQGAYQ

SEQ ID NO: 586 - protein, 326 aa, Artificial Sequence
  Synthetic
MSELNTARGPIDTADLGVTLMHEHVFIMTTEIALNYPDAWGDEEQRVADAITRLNELKSRGVDTIIDLTVIGLGRYIPRIARVAAETELNIVVATGLYTYNDIPFRFHYEGPGGLLGGPEIMTDMFVRDIEEGIADTGIKAGILKCATDEPGITPGVERVLRAVAQAHKRTGVPISTHTHAGLRRGLEQQRIFEEEGVDLTRVIIGHSGDSTDVGYLEELIAAGSYLDMDRFGLDVISPFEQRVDIVAQMCERGHADKMVLSHDANCYFDALPEELVPQMAPNWHYLHIHNDVLPALKERGVTDEQIHTMLVENPRKIFDRQGAYQ

SEQ ID NO: 587 - protein, 326 aa, Artificial Sequence
  Synthetic
MSELNTARGPIDTADLGVTLMHEHVFIMTTEIALNYPDAWGDEEQRVADAITRLNELKSRGVDTIIDLTVIGLGRYIPRIARVAAETELNIVVATGLYTYNDIPFRFHYEGPGGLLGGPEIMTDMFVRDIEEGIADTGIKAGILKCATDEPGITPGVERVLRAVAQAHKRTGVPISTHTHAGLRRGLEQQRIFEEEGVDLTRVIIGHSGDSTDVGYLEELIAAGSYLQMDRFGLDVISPFEQRVDIVAQMCERGHADKMVLSHDANCYFDALPEELVPQMAPNWHYLHIHNDVLPALKERGVTDEQIHTMLVENPRKIFDRQGAYQ

SEQ ID NO: 588 - protein, 326 aa, Artificial Sequence
  Synthetic
MSELNTARGPIDTADLGVTLMHEHVFIMTTEIALNYPDAWGDEEQRVADAITRLNELKSRGVDTIIDLTVIGLGRYIPRIARVAAETELNIVVATGLYTYNDIPFRFHYEGPGGLLGGPEIMTDMFVRDIEEGIADTGIKAGILKCATDEPGITPGVERVLRAVAQAHKRTGVPISTHTHAGLRRGLEQQRIFEEEGVDLTRVIIGHSGDSTDVGYLEELIAAGSYLSMDRFGLDVISPFEQRVDIVAQMCERGHADKMVLSHDANCYFDALPEELVPQMAPNWHYLHIHNDVLPALKERGVTDEQIHTMLVENPRKIFDRQGAYQ

SEQ ID NO: 589 - protein, 326 aa, Artificial Sequence
  Synthetic
MSELNTARGPIDTADLGVTLMHEHVFIMTTEIALNYPDAWGDEEQRVADAITRLNELKSRGVDTIIDLTVIGLGRYIPRIARVAAETELNIVVATGLYTYNDIPFRFHYEGPGGLLGGPEIMTDMFVRDIEEGIADTGIKAGILKCATDEPGITPGVERVLRAVAQAHKRTGVPISTHTHAGLRRGLEQQRIFEEEGVDLTRVIIGHSGDSTDVGYLEELIAAGSYLGMNRFGLDVISPFEQRVDIVAQMCERGHADKMVLSHDANCYFDALPEELVPQMAPNWHYLHIHNDVLPALKERGVTDEQIHTMLVENPRKIFDRQGAYQ

SEQ ID NO: 590 - protein, 326 aa, Artificial Sequence
  Synthetic
MSELNTARGPIDTADLGVTLMHEHVFIMTTEIALNYPDAWGDEEQRVADAITRLNELKSRGVDTIIDLTVIGLGRYIPRIARVAAETELNIVVATGLYTYNDIPFRFHYEGPGGLLGGPEIMTDMFVRDIEEGIADTGIKAGILKCATDEPGITPGVERVLRAVAQAHKRTGVPISTHTHAGLRRGLEQQRIFEEEGVDLTRVIIGHSGDSTDVGYLEELIAAGSYLGMDHFGLDVISPFEQRVDIVAQMCERGHADKMVLSHDANCYFDALPEELVPQMAPNWHYLHIHNDVLPALKERGVTDEQIHTMLVENPRKIFDRQGAYQ

SEQ ID NO: 591 - protein, 326 aa, Artificial Sequence
  Synthetic
MSELNTARGPIDTADLGVTLMHEHVFIMTTEIALNYPDAWGDEEQRVADAITRLNELKSRGVDTIIDLTVIGLGRYIPRIARVAAETELNIVVATGLYTYNDIPFRFHYEGPGGLLGGPEIMTDMFVRDIEEGIADTGIKAGILKCATDEPGITPGVERVLRAVAQAHKRTGVPISTHTHAGLRRGLEQQRIFEEEGVDLTRVIIGHSGDSTDVGYLEELIAAGSYLGMDMFGLDVISPFEQRVDIVAQMCERGHADKMVLSHDANCYFDALPEELVPQMAPNWHYLHIHNDVLPALKERGVTDEQIHTMLVENPRKIFDRQGAYQ

SEQ ID NO: 592 - protein, 326 aa, Artificial Sequence
  Synthetic
MSELNTARGPIDTADLGVTLMHEHVFIMTTEIALNYPDAWGDEEQRVADAITRLNELKSRGVDTIIDLTVIGLGRYIPRIARVAAETELNIVVATGLYTYNDIPFRFHYEGPGGLLGGPEIMTDMFVRDIEEGIADTGIKAGILKCATDEPGITPGVERVLRAVAQAHKRTGVPISTHTHAGLRRGLEQQRIFEEEGVDLTRVIIGHSGDSTDVGYLEELIAAGSYLGMDNFGLDVISPFEQRVDIVAQMCERGHADKMVLSHDANCYFDALPEELVPQMAPNWHYLHIHNDVLPALKERGVTDEQIHTMLVENPRKIFDRQGAYQ

SEQ ID NO: 593 - protein, 326 aa, Artificial Sequence
  Synthetic
MSELNTARGPIDTADLGVTLMHEHVFIMTTEIALNYPDAWGDEEQRVADAITRLNELKSRGVDTIIDLTVIGLGRYIPRIARVAAETELNIVVATGLYTYNDIPFRFHYEGPGGLLGGPEIMTDMFVRDIEEGIADTGIKAGILKCATDEPGITPGVERVLRAVAQAHKRTGVPISTHTHAGLRRGLEQQRIFEEEGVDLTRVIIGHSGDSTDVGYLEELIAAGSYLGMDQFGLDVISPFEQRVDIVAQMCERGHADKMVLSHDANCYFDALPEELVPQMAPNWHYLHIHNDVLPALKERGVTDEQIHTMLVENPRKIFDRQGAYQ

SEQ ID NO: 594 - protein, 326 aa, Artificial Sequence
  Synthetic
MSELNTARGPIDTADLGVTLMHEHVFIMTTEIALNYPDAWGDEEQRVADAITRLNELKSRGVDTIIDLTVIGLGRYIPRIARVAAETELNIVVATGLYTYNDIPFRFHYEGPGGLLGGPEIMTDMFVRDIEEGIADTGIKAGILKCATDEPGITPGVERVLRAVAQAHKRTGVPISTHTHAGLRRGLEQQRIFEEEGVDLTRVIIGHSGDSTDVGYLEELIAAGSYLGMDTFGLDVISPFEQRVDIVAQMCERGHADKMVLSHDANCYFDALPEELVPQMAPNWHYLHIHNDVLPALKERGVTDEQIHTMLVENPRKIFDRQGAYQ

SEQ ID NO: 595 - protein, 326 aa, Artificial Sequence
  Synthetic
MSELNTARGPIDTADLGVTLMHEHVFIMTTEIALNYPDAWGDEEQRVADAITRLNELKSRGVDTIIDLTVIGLGRYIPRIARVAAETELNIVVATGLYTYNDIPFRFHYEGPGGLLGGPEIMTDMFVRDIEEGIADTGIKAGILKCATDEPGITPGVERVLRAVAQAHKRTGVPISTHTHAGLRRGLEQQRIFEEEGVDLTRVIIGHSGDSTDVGYLEELIAAGSYLGMDWFGLDVISPFEQRVDIVAQMCERGHADKMVLSHDANCYFDALPEELVPQMAPNWHYLHIHNDVLPALKERGVTDEQIHTMLVENPRKIFDRQGAYQ

SEQ ID NO: 596 - protein, 326 aa, Artificial Sequence
  Synthetic
MSELNTARGPIDTADLGVTLMHEHVFIMTTEIALNYPDAWGDEEQRVADAITRLNELKSRGVDTIIDLTVIGLGRYIPRIARVAAETELNIVVATGLYTYNDIPFRFHYEGPGGLLGGPEIMTDMFVRDIEEGIADTGIKAGILKCATDEPGITPGVERVLRAVAQAHKRTGVPISTHTHAGLRRGLEQQRIFEEEGVDLTRVIIGHSGDSTDVGYLEELIAAGSYLGMDRFGLDVISPFEQRVDIVAQMCERGHADKMILSHDANCYFDALPEELVPQMAPNWHYLHIHNDVLPALKERGVTDEQIHTMLVENPRKIFDRQGAYQ

SEQ ID NO: 597 - protein, 326 aa, Artificial Sequence
  Synthetic
MSELNTARGPIDTADLGVTLMHEHVFIMTTEIALNYPDAWGDEEQRVADAITRLNELKSRGVDTIIDLTVIGLGRYIPRIARVAAETELNIVVATGLYTYNDIPFRFHYEGPGGLLGGPEIMTDMFVRDIEEGIADTGIKAGILKCATDEPGITPGVERVLRAVAQAHKRTGVPISTHTHAGLRRGLEQQRIFEEEGVDLTRVIIGHSGDSTDVGYLEELIAAGSYLGMDRFGLDVISPFEQRVDIVAQMCERGHADKMVLGHDANCYFDALPEELVPQMAPNWHYLHIHNDVLPALKERGVTDEQIHTMLVENPRKIFDRQGAYQ

SEQ ID NO: 598 - protein, 326 aa, Artificial Sequence
  Synthetic
MSELNTARGPIDTADLGVTLMHEHVFIMTTEIALNYPDAWGDEEQRVADAITRLNELKSRGVDTIIDLTVIGLGRYIPRIARVAAETELNIVVATGLYTYNDIPFRFHYEGPGGLLGGPEIMTDMFVRDIEEGIADTGIKAGILKCATDEPGITPGVERVLRAVAQAHKRTGVPISTHTHAGLRRGLEQQRIFEEEGVDLTRVIIGHSGDSTDVGYLEELIAAGSYLGMDRFGLDVISPFEQRVDIVAQMCERGHADKMVLSFDANCYFDALPEELVPQMAPNWHYLHIHNDVLPALKERGVTDEQIHTMLVENPRKIFDRQGAYQ

SEQ ID NO: 599 - protein, 326 aa, Artificial Sequence
  Synthetic
MSELNTARGPIDTADLGVTLMHEHVFIMTTEIALNYPDAWGDEEQRVADAITRLNELKSRGVDTIIDLTVIGLGRYIPRIARVAAETELNIVVATGLYTYNDIPFRFHYEGPGGLLGGPEIMTDMFVRDIEEGIADTGIKAGILKCATDEPGITPGVERVLRAVAQAHKRTGVPISTHTHAGLRRGLEQQRIFEEEGVDLTRVIIGHSGDSTDVGYLEELIAAGSYLGMDRFGLDVISPFEQRVDIVAQMCERGHADKMVLSGDANCYFDALPEELVPQMAPNWHYLHIHNDVLPALKERGVTDEQIHTMLVENPRKIFDRQGAYQ

SEQ ID NO: 600 - protein, 326 aa, Artificial Sequence
  Synthetic
MSELNTARGPIDTADLGVTLMHEHVFIMTTEIALNYPDAWGDEEQRVADAITRLNELKSRGVDTIIDLTVIGLGRYIPRIARVAAETELNIVVATGLYTYNDIPFRFHYEGPGGLLGGPEIMTDMFVRDIEEGIADTGIKAGILKCATDEPGITPGVERVLRAVAQAHKRTGVPISTHTHAGLRRGLEQQRIFEEEGVDLTRVIIGHSGDSTDVGYLEELIAAGSYLGMDRFGLDVISPFEQRVDIVAQMCERGHADKMVLSMDANCYFDALPEELVPQMAPNWHYLHIHNDVLPALKERGVTDEQIHTMLVENPRKIFDRQGAYQ

SEQ ID NO: 601 - protein, 326 aa, Artificial Sequence
  Synthetic
MSELNTARGPIDTADLGVTLMHEHVFIMTTEIALNYPDAWGDEEQRVADAITRLNELKSRGVDTIIDLTVIGLGRYIPRIARVAAETELNIVVATGLYTYNDIPFRFHYEGPGGLLGGPEIMTDMFVRDIEEGIADTGIKAGILKCATDEPGITPGVERVLRAVAQAHKRTGVPISTHTHAGLRRGLEQQRIFEEEGVDLTRVIIGHSGDSTDVGYLEELIAAGSYLGMDRFGLDVISPFEQRVDIVAQMCERGHADKMVLSQDANCYFDALPEELVPQMAPNWHYLHIHNDVLPALKERGVTDEQIHTMLVENPRKIFDRQGAYQ

SEQ ID NO: 602 - protein, 326 aa, Artificial Sequence
  Synthetic
MSELNTARGPIDTADLGVTLMHEHVFIMTTEIALNYPDAWGDEEQRVADAITRLNELKSRGVDTIIDLTVIGLGRYIPRIARVAAETELNIVVATGLYTYNDIPFRFHYEGPGGLLGGPEIMTDMFVRDIEEGIADTGIKAGILKCATDEPGITPGVERVLRAVAQAHKRTGVPISTHTHAGLRRGLEQQRIFEEEGVDLTRVIIGHSGDSTDVGYLEELIAAGSYLGMDRFGLDVISPFEQRVDIVAQMCERGHADKMVLSTDANCYFDALPEELVPQMAPNWHYLHIHNDVLPALKERGVTDEQIHTMLVENPRKIFDRQGAYQ

SEQ ID NO: 603 - protein, 326 aa, Artificial Sequence
  Synthetic
MSELNTARGPIDTADLGVTLMHEHVFIMTTEIALNYPDAWGDEEQRVADAITRLNELKSRGVDTIIDLTVIGLGRYIPRIARVAAETELNIVVATGLYTYNDIPFRFHYEGPGGLLGGPEIMTDMFVRDIEEGIADTGIKAGILKCATDEPGITPGVERVLRAVAQAHKRTGVPISTHTHAGLRRGLEQQRIFEEEGVDLTRVIIGHSGDSTDVGYLEELIAAGSYLGMDRFGLDVISPFEQRVDIVAQMCERGHADKMVLSHPANCYFDALPEELVPQMAPNWHYLHIHNDVLPALKERGVTDEQIHTMLVENPRKIFDRQGAYQ

SEQ ID NO: 604 - protein, 326 aa, Artificial Sequence
  Synthetic
MSELNTARGPIDTADLGVTLMHEHVFIMTTEIALNYPDAWGDEEQRVADAITRLNELKSRGVDTIIDLTVIGLGRYIPRIARVAAETELNIVVATGLYTYNDIPFRFHYEGPGGLLGGPEIMTDMFVRDIEEGIADTGIKAGILKCATDEPGITPGVERVLRAVAQAHKRTGVPISTHTHAGLRRGLEQQRIFEEEGVDLTRVIIGHSGDSTDVGYLEELIAAGSYLGMDRFGLDVISPFEQRVDIVAQMCERGHADKMVLSHSANCYFDALPEELVPQMAPNWHYLHIHNDVLPALKERGVTDEQIHTMLVENPRKIFDRQGAYQ

SEQ ID NO: 605 - protein, 326 aa, Artificial Sequence
  Synthetic
MSELNTARGPIDTADLGVTLMHEHVFIMTTEIALNYPDAWGDEEQRVADAITRLNELKSRGVDTIIDLTVIGLGRYIPRIARVAAETELNIVVATGLYTYNDIPFRFHYEGPGGLLGGPEIMTDMFVRDIEEGIADTGIKAGILKCATDEPGITPGVERVLRAVAQAHKRTGVPISTHTHAGLRRGLEQQRIFEEEGVDLTRVIIGHSGDSTDVGYLEELIAAGSYLGMDRFGLDVISPFEQRVDIVAQMCERGHADKMVLSHTANCYFDALPEELVPQMAPNWHYLHIHNDVLPALKERGVTDEQIHTMLVENPRKIFDRQGAYQ

SEQ ID NO: 606 - protein, 326 aa, Artificial Sequence
  Synthetic
MSELNTARGPIDTADLGVTLMHEHVFIMTTEIALNYPDAWGDEEQRVADAITRLNELKSRGVDTIIDLTVIGLGRYIPRIARVAAETELNIVVATGLYTYNDIPFRFHYEGPGGLLGGPEIMTDMFVRDIEEGIADTGIKAGILKCATDEPGITPGVERVLRAVAQAHKRTGVPISTHTHAGLRRGLEQQRIFEEEGVDLTRVIIGHSGDSTDVGYLEELIAAGSYLGMDRFGLDVISPFEQRVDIVAQMCERGHADKMVLSHDINCYFDALPEELVPQMAPNWHYLHIHNDVLPALKERGVTDEQIHTMLVENPRKIFDRQGAYQ

SEQ ID NO: 607 - protein, 326 aa, Artificial Sequence
  Synthetic
MSELNTARGPIDTADLGVTLMHEHVFIMTTEIALNYPDAWGDEEQRVADAITRLNELKSRGVDTIIDLTVIGLGRYIPRIARVAAETELNIVVATGLYTYNDIPFRFHYEGPGGLLGGPEIMTDMFVRDIEEGIADTGIKAGILKCATDEPGITPGVERVLRAVAQAHKRTGVPISTHTHAGLRRGLEQQRIFEEEGVDLTRVIIGHSGDSTDVGYLEELIAAGSYLGMDRFGLDVISPFEQRVDIVAQMCERGHADKMVLSHDMNCYFDALPEELVPQMAPNWHYLHIHNDVLPALKERGVTDEQIHTMLVENPRKIFDRQGAYQ

SEQ ID NO: 608 - protein, 326 aa, Artificial Sequence
  Synthetic
MSELNTARGPIDTADLGVTLMHEHVFIMTTEIALNYPDAWGDEEQRVADAITRLNELKSRGVDTIIDLTVIGLGRYIPRIARVAAETELNIVVATGLYTYNDIPFRFHYEGPGGLLGGPEIMTDMFVRDIEEGIADTGIKAGILKCATDEPGITPGVERVLRAVAQAHKRTGVPISTHTHAGLRRGLEQQRIFEEEGVDLTRVIIGHSGDSTDVGYLEELIAAGSYLGMDRFGLDVISPFEQRVDIVAQMCERGHADKMVLSHDSNCYFDALPEELVPQMAPNWHYLHIHNDVLPALKERGVTDEQIHTMLVENPRKIFDRQGAYQ

SEQ ID NO: 609 - protein, 326 aa, Artificial Sequence
  Synthetic
MSELNTARGPIDTADLGVTLMHEHVFIMTTEIALNYPDAWGDEEQRVADAITRLNELKSRGVDTIIDLTVIGLGRYIPRIARVAAETELNIVVATGLYTYNDIPFRFHYEGPGGLLGGPEIMTDMFVRDIEEGIADTGIKAGILKCATDEPGITPGVERVLRAVAQAHKRTGVPISTHTHAGLRRGLEQQRIFEEEGVDLTRVIIGHSGDSTDVGYLEELIAAGSYLGMDRFGLDVISPFEQRVDIVAQMCERGHADKMVLSHDTNCYFDALPEELVPQMAPNWHYLHIHNDVLPALKERGVTDEQIHTMLVENPRKIFDRQGAYQ

SEQ ID NO: 610 - protein, 326 aa, Artificial Sequence
  Synthetic
MSELNTARGPIDTADLGVTLMHEHVFIMTTEIALNYPDAWGDEEQRVADAITRLNELKSRGVDTIIDLTVIGLGRYIPRIARVAAETELNIVVATGLYTYNDIPFRFHYEGPGGLLGGPEIMTDMFVRDIEEGIADTGIKAGILKCATDEPGITPGVERVLRAVAQAHKRTGVPISTHTHAGLRRGLEQQRIFEEEGVDLTRVIIGHSGDSTDVGYLEELIAAGSYLGMDRFGLDVISPFEQRVDIVAQMCERGHADKMVLSHDWNCYFDALPEELVPQMAPNWHYLHIHNDVLPALKERGVTDEQIHTMLVENPRKIFDRQGAYQ

SEQ ID NO: 611 - protein, 326 aa, Artificial Sequence
  Synthetic
MSELNTARGPIDTADLGVTLMHEHVFIMTTEIALNYPDAWGDEEQRVADAITRLNELKSRGVDTIIDLTVIGLGRYIPRIARVAAETELNIVVATGLYTYNDIPFRFHYEGPGGLLGGPEIMTDMFVRDIEEGIADTGIKAGILKCATDEPGITPGVERVLRAVAQAHKRTGVPISTHTHAGLRRGLEQQRIFEEEGVDLTRVIIGHSGDSTDVGYLEELIAAGSYLGMDRFGLDVISPFEQRVDIVAQMCERGHADKMVLSHDYNCYFDALPEELVPQMAPNWHYLHIHNDVLPALKERGVTDEQIHTMLVENPRKIFDRQGAYQ

SEQ ID NO: 612 - protein, 326 aa, Artificial Sequence
  Synthetic
MSELNTARGPIDTADLGVTLMHEHVFIMTTEIALNYPDAWGDEEQRVADAITRLNELKSRGVDTIIDLTVIGLGRYIPRIARVAAETELNIVVATGLYTYNDIPFRFHYEGPGGLLGGPEIMTDMFVRDIEEGIADTGIKAGILKCATDEPGITPGVERVLRAVAQAHKRTGVPISTHTHAGLRRGLEQQRIFEEEGVDLTRVIIGHSGDSTDVGYLEELIAAGSYLGMDRFGLDVISPFEQRVDIVAQMCERGHADKMVLSHDAACYFDALPEELVPQMAPNWHYLHIHNDVLPALKERGVTDEQIHTMLVENPRKIFDRQGAYQ

SEQ ID NO: 613 - protein, 326 aa, Artificial Sequence
  Synthetic
MSELNTARGPIDTADLGVTLMHEHVFIMTTEIALNYPDAWGDEEQRVADAITRLNELKSRGVDTIIDLTVIGLGRYIPRIARVAAETELNIVVATGLYTYNDIPFRFHYEGPGGLLGGPEIMTDMFVRDIEEGIADTGIKAGILKCATDEPGITPGVERVLRAVAQAHKRTGVPISTHTHAGLRRGLEQQRIFEEEGVDLTRVIIGHSGDSTDVGYLEELIAAGSYLGMDRFGLDVISPFEQRVDIVAQMCERGHADKMVLSHDACCYFDALPEELVPQMAPNWHYLHIHNDVLPALKERGVTDEQIHTMLVENPRKIFDRQGAYQ

SEQ ID NO: 614 - protein, 326 aa, Artificial Sequence
  Synthetic
MSELNTARGPIDTADLGVTLMHEHVFIMTTEIALNYPDAWGDEEQRVADAITRLNELKSRGVDTIIDLTVIGLGRYIPRIARVAAETELNIVVATGLYTYNDIPFRFHYEGPGGLLGGPEIMTDMFVRDIEEGIADTGIKAGILKCATDEPGITPGVERVLRAVAQAHKRTGVPISTHTHAGLRRGLEQQRIFEEEGVDLTRVIIGHSGDSTDVGYLEELIAAGSYLGMDRFGLDVISPFEQRVDIVAQMCERGHADKMVLSHDAGCYFDALPEELVPQMAPNWHYLHIHNDVLPALKERGVTDEQIHTMLVENPRKIFDRQGAYQ

SEQ ID NO: 615 - protein, 326 aa, Artificial Sequence
  Synthetic
MSELNTARGPIDTADLGVTLMHEHVFIMTTEIALNYPDAWGDEEQRVADAITRLNELKSRGVDTIIDLTVIGLGRYIPRIARVAAETELNIVVATGLYTYNDIPFRFHYEGPGGLLGGPEIMTDMFVRDIEEGIADTGIKAGILKCATDEPGITPGVERVLRAVAQAHKRTGVPISTHTHAGLRRGLEQQRIFEEEGVDLTRVIIGHSGDSTDVGYLEELIAAGSYLGMDRFGLDVISPFEQRVDIVAQMCERGHADKMVLSHDAHCYFDALPEELVPQMAPNWHYLHIHNDVLPALKERGVTDEQIHTMLVENPRKIFDRQGAYQ

SEQ ID NO: 616 - protein, 326 aa, Artificial Sequence
  Synthetic
MSELNTARGPIDTADLGVTLMHEHVFIMTTEIALNYPDAWGDEEQRVADAITRLNELKSRGVDTIIDLTVIGLGRYIPRIARVAAETELNIVVATGLYTYNDIPFRFHYEGPGGLLGGPEIMTDMFVRDIEEGIADTGIKAGILKCATDEPGITPGVERVLRAVAQAHKRTGVPISTHTHAGLRRGLEQQRIFEEEGVDLTRVIIGHSGDSTDVGYLEELIAAGSYLGMDRFGLDVISPFEQRVDIVAQMCERGHADKMVLSHDAICYFDALPEELVPQMAPNWHYLHIHNDVLPALKERGVTDEQIHTMLVENPRKIFDRQGAYQ

SEQ ID NO: 617 - protein, 326 aa, Artificial Sequence
  Synthetic
MSELNTARGPIDTADLGVTLMHEHVFIMTTEIALNYPDAWGDEEQRVADAITRLNELKSRGVDTIIDLTVIGLGRYIPRIARVAAETELNIVVATGLYTYNDIPFRFHYEGPGGLLGGPEIMTDMFVRDIEEGIADTGIKAGILKCATDEPGITPGVERVLRAVAQAHKRTGVPISTHTHAGLRRGLEQQRIFEEEGVDLTRVIIGHSGDSTDVGYLEELIAAGSYLGMDRFGLDVISPFEQRVDIVAQMCERGHADKMVLSHDALCYFDALPEELVPQMAPNWHYLHIHNDVLPALKERGVTDEQIHTMLVENPRKIFDRQGAYQ

SEQ ID NO: 618 - protein, 326 aa, Artificial Sequence
  Synthetic
MSELNTARGPIDTADLGVTLMHEHVFIMTTEIALNYPDAWGDEEQRVADAITRLNELKSRGVDTIIDLTVIGLGRYIPRIARVAAETELNIVVATGLYTYNDIPFRFHYEGPGGLLGGPEIMTDMFVRDIEEGIADTGIKAGILKCATDEPGITPGVERVLRAVAQAHKRTGVPISTHTHAGLRRGLEQQRIFEEEGVDLTRVIIGHSGDSTDVGYLEELIAAGSYLGMDRFGLDVISPFEQRVDIVAQMCERGHADKMVLSHDAQCYFDALPEELVPQMAPNWHYLHIHNDVLPALKERGVTDEQIHTMLVENPRKIFDRQGAYQ

SEQ ID NO: 619 - protein, 326 aa, Artificial Sequence
  Synthetic
MSELNTARGPIDTADLGVTLMHEHVFIMTTEIALNYPDAWGDEEQRVADAITRLNELKSRGVDTIIDLTVIGLGRYIPRIARVAAETELNIVVATGLYTYNDIPFRFHYEGPGGLLGGPEIMTDMFVRDIEEGIADTGIKAGILKCATDEPGITPGVERVLRAVAQAHKRTGVPISTHTHAGLRRGLEQQRIFEEEGVDLTRVIIGHSGDSTDVGYLEELIAAGSYLGMDRFGLDVISPFEQRVDIVAQMCERGHADKMVLSHDATCYFDALPEELVPQMAPNWHYLHIHNDVLPALKERGVTDEQIHTMLVENPRKIFDRQGAYQ

SEQ ID NO: 620 - protein, 326 aa, Artificial Sequence
  Synthetic
MSELNTARGPIDTADLGVTLMHEHVFIMTTEIALNYPDAWGDEEQRVADAITRLNELKSRGVDTIIDLTVIGLGRYIPRIARVAAETELNIVVATGLYTYNDIPFRFHYEGPGGLLGGPEIMTDMFVRDIEEGIADTGIKAGILKCATDEPGITPGVERVLRAVAQAHKRTGVPISTHTHAGLRRGLEQQRIFEEEGVDLTRVIIGHSGDSTDVGYLEELIAAGSYLGMDRFGLDVISPFEQRVDIVAQMCERGHADKMVLSHDAWCYFDALPEELVPQMAPNWHYLHIHNDVLPALKERGVTDEQIHTMLVENPRKIFDRQGAYQ

SEQ ID NO: 621 - protein, 326 aa, Artificial Sequence
  Synthetic
MSELNTARGPIDTADLGVTLMHEHVFIMTTEIALNYPDAWGDEEQRVADAITRLNELKSRGVDTIIDLTVIGLGRYIPRIARVAAETELNIVVATGLYTYNDIPFRFHYEGPGGLLGGPEIMTDMFVRDIEEGIADTGIKAGILKCATDEPGITPGVERVLRAVAQAHKRTGVPISTHTHAGLRRGLEQQRIFEEEGVDLTRVIIGHSGDSTDVGYLEELIAAGSYLGMDRFGLDVISPFEQRVDIVAQMCERGHADKMVLSHDANTYFDALPEELVPQMAPNWHYLHIHNDVLPALKERGVTDEQIHTMLVENPRKIFDRQGAYQ

SEQ ID NO: 622 - protein, 326 aa, Artificial Sequence
  Synthetic
MSELNTARGPIDTADLGVTLMHEHVFIMTTEIALNYPDAWGDEEQRVADAITRLNELKSRGVDTIIDLTVIGLGRYIPRIARVAAETELNIVVATGLYTYNDIPFRFHYEGPGGLLGGPEIMTDMFVRDIEEGIADTGIKAGILKCATDEPGITPGVERVLRAVAQAHKRTGVPISTHTHAGLRRGLEQQRIFEEEGVDLTRVIIGHSGDSTDVGYLEELIAAGSYLGMDRFGLDVISPFEQRVDIVAQMCERGHADKMVLSHDANWYFDALPEELVPQMAPNWHYLHIHNDVLPALKERGVTDEQIHTMLVENPRKIFDRQGAYQ

SEQ ID NO: 623 - protein, 326 aa, Artificial Sequence
  Synthetic
MSELNTARGPIDTADLGVTLMHEHVFIMTTEIALNYPDAWGDEEQRVADAITRLNELKSRGVDTIIDLTVIGLGRYIPRIARVAAETELNIVVATGLYTYNDIPFRFHYEGPGGLLGGPEIMTDMFVRDIEEGIADTGIKAGILKCATDEPGITPGVERVLRAVAQAHKRTGVPISTHTHAGLRRGLEQQRIFEEEGVDLTRVIIGHSGDSTDVGYLEELIAAGSYLGMDRFGLDVISPFEQRVDIVAQMCERGHADKMVLSHDANCYFDALPEELVPQMAPNEHYLHIHNDVLPALKERGVTDEQIHTMLVENPRKIFDRQGAYQ

SEQ ID NO: 624 - protein, 326 aa, Artificial Sequence
  Synthetic
MSELNTARGPIDTADLGVTLMHEHVFIMTTEIALNYPDAWGDEEQRVADAITRLNELKSRGVDTIIDLTVIGLGRYIPRIARVAAETELNIVVATGLYTYNDIPFRFHYEGPGGLLGGPEIMTDMFVRDIEEGIADTGIKAGILKCATDEPGITPGVERVLRAVAQAHKRTGVPISTHTHAGLRRGLEQQRIFEEEGVDLTRVIIGHSGDSTDVGYLEELIAAGSYLGMDRFGLDVISPFEQRVDIVAQMCERGHADKMVLSHDANCYFDALPEELVPQMAPNHHYLHIHNDVLPALKERGVTDEQIHTMLVENPRKIFDRQGAYQ

SEQ ID NO: 625 - protein, 326 aa, Artificial Sequence
  Synthetic
MSELNTARGPIDTADLGVTLMHEHVFIMTTEIALNYPDAWGDEEQRVADAITRLNELKSRGVDTIIDLTVIGLGRYIPRIARVAAETELNIVVATGLYTYNDIPFRFHYEGPGGLLGGPEIMTDMFVRDIEEGIADTGIKAGILKCATDEPGITPGVERVLRAVAQAHKRTGVPISTHTHAGLRRGLEQQRIFEEEGVDLTRVIIGHSGDSTDVGYLEELIAAGSYLGMDRFGLDVISPFEQRVDIVAQMCERGHADKMVLSHDANCYFDALPEELVPQMAPNIHYLHIHNDVLPALKERGVTDEQIHTMLVENPRKIFDRQGAYQ

SEQ ID NO: 626 - protein, 326 aa, Artificial Sequence
  Synthetic
MSELNTARGPIDTADLGVTLMHEHVFIMTTEIALNYPDAWGDEEQRVADAITRLNELKSRGVDTIIDLTVIGLGRYIPRIARVAAETELNIVVATGLYTYNDIPFRFHYEGPGGLLGGPEIMTDMFVRDIEEGIADTGIKAGILKCATDEPGITPGVERVLRAVAQAHKRTGVPISTHTHAGLRRGLEQQRIFEEEGVDLTRVIIGHSGDSTDVGYLEELIAAGSYLGMDRFGLDVISPFEQRVDIVAQMCERGHADKMVLSHDANCYFDALPEELVPQMAPNKHYLHIHNDVLPALKERGVTDEQIHTMLVENPRKIFDRQGAYQ

SEQ ID NO: 627 - protein, 326 aa, Artificial Sequence
  Synthetic
MSELNTARGPIDTADLGVTLMHEHVFIMTTEIALNYPDAWGDEEQRVADAITRLNELKSRGVDTIIDLTVIGLGRYIPRIARVAAETELNIVVATGLYTYNDIPFRFHYEGPGGLLGGPEIMTDMFVRDIEEGIADTGIKAGILKCATDEPGITPGVERVLRAVAQAHKRTGVPISTHTHAGLRRGLEQQRIFEEEGVDLTRVIIGHSGDSTDVGYLEELIAAGSYLGMDRFGLDVISPFEQRVDIVAQMCERGHADKMVLSHDANCYFDALPEELVPQMAPNPHYLHIHNDVLPALKERGVTDEQIHTMLVENPRKIFDRQGAYQ

SEQ ID NO: 628 - protein, 326 aa, Artificial Sequence
  Synthetic
MSELNTARGPIDTADLGVTLMHEHVFIMTTEIALNYPDAWGDEEQRVADAITRLNELKSRGVDTIIDLTVIGLGRYIPRIARVAAETELNIVVATGLYTYNDIPFRFHYEGPGGLLGGPEIMTDMFVRDIEEGIADTGIKAGILKCATDEPGITPGVERVLRAVAQAHKRTGVPISTHTHAGLRRGLEQQRIFEEEGVDLTRVIIGHSGDSTDVGYLEELIAAGSYLGMDRFGLDVISPFEQRVDIVAQMCERGHADKMVLSHDANCYFDALPEELVPQMAPNRHYLHIHNDVLPALKERGVTDEQIHTMLVENPRKIFDRQGAYQ

SEQ ID NO: 629 - protein, 326 aa, Artificial Sequence
  Synthetic
MSELNTARGPIDTADLGVTLMHEHVFIMTTEIALNYPDAWGDEEQRVADAITRLNELKSRGVDTIIDLTVIGLGRYIPRIARVAAETELNIVVATGLYTYNDIPFRFHYEGPGGLLGGPEIMTDMFVRDIEEGIADTGIKAGILKCATDEPGITPGVERVLRAVAQAHKRTGVPISTHTHAGLRRGLEQQRIFEEEGVDLTRVIIGHSGDSTDVGYLEELIAAGSYLGMDRFGLDVISPFEQRVDIVAQMCERGHADKMVLSHDANCYFDALPEELVPQMAPNTHYLHIHNDVLPALKERGVTDEQIHTMLVENPRKIFDRQGAYQ

SEQ ID NO: 630 - protein, 326 aa, Artificial Sequence
  Synthetic
MSELNTARGTIDTADLGVTMMHEHVFIMTTEIALNYPEAWGDEEKRVADAVARLNELKSRGVDTIVDLTVIGLGRYIPRIARVAAQTELNIVVATGLYTYNDIPFRFHYEGPGGMLDGPEIMTDMFVRDIEQGIADTGIKAGILKCATDEPGITPGVERVLRAVAQAHKRTGVPISTHTHAGLRRGLEQQRIFEEEGVDLTRVIIGHSGDSTDVGYLEELISAGSYLGMDRFGLDVLLPFEERVQIVATMCERGHADKMVLSHDANCYFDALPEQLVPQMAPNWHYLHIHNDVIPALKHRGVTDEQIHTMLVENPRKIFDRQGAYQ

SEQ ID NO: 631 - protein, 326 aa, Artificial Sequence
  Synthetic
MSELNTARGTIDTADLGVTLMHDHVFIMTTEIALNYPEAWGDEEKRVADAVARLNELKSRGVDTIVDLTVIGLGRYIPRIARVAAQTELNIVVATGLYTYNDIPFRFHYEGPGGMLDGPEIMTDMFVRDIEQGIADTGIKAGILKCATDEPGITPGVERVLRAVAQAHKRTGVPISTHTHAGLRRGLEQQRIFEEEGVDLTRVIIGHSGDSTDVGYLEELISAGSYLGMDRFGLDVLLPFEERVQIVATMCERGHADKMVLSHDANCYFDALPEQLVPQMAPNWHYLHIHNDVIPALKHRGVTDEQIHTMLVENPRKIFDRQGAYQ

SEQ ID NO: 632 - protein, 326 aa, Artificial Sequence
  Synthetic
MSELNTARGTIDTADLGVTLMHEHLFIMTTEIALNYPEAWGDEEKRVADAVARLNELKSRGVDTIVDLTVIGLGRYIPRIARVAAQTELNIVVATGLYTYNDIPFRFHYEGPGGMLDGPEIMTDMFVRDIEQGIADTGIKAGILKCATDEPGITPGVERVLRAVAQAHKRTGVPISTHTHAGLRRGLEQQRIFEEEGVDLTRVIIGHSGDSTDVGYLEELISAGSYLGMDRFGLDVLLPFEERVQIVATMCERGHADKMVLSHDANCYFDALPEQLVPQMAPNWHYLHIHNDVIPALKHRGVTDEQIHTMLVENPRKIFDRQGAYQ

SEQ ID NO: 633 - protein, 326 aa, Artificial Sequence
  Synthetic
MSELNTARGTIDTADLGVTLMHEHMFIMTTEIALNYPEAWGDEEKRVADAVARLNELKSRGVDTIVDLTVIGLGRYIPRIARVAAQTELNIVVATGLYTYNDIPFRFHYEGPGGMLDGPEIMTDMFVRDIEQGIADTGIKAGILKCATDEPGITPGVERVLRAVAQAHKRTGVPISTHTHAGLRRGLEQQRIFEEEGVDLTRVIIGHSGDSTDVGYLEELISAGSYLGMDRFGLDVLLPFEERVQIVATMCERGHADKMVLSHDANCYFDALPEQLVPQMAPNWHYLHIHNDVIPALKHRGVTDEQIHTMLVENPRKIFDRQGAYQ

SEQ ID NO: 634 - protein, 326 aa, Artificial Sequence
  Synthetic
MSELNTARGTIDTADLGVTLMHEHVHIMTTEIALNYPEAWGDEEKRVADAVARLNELKSRGVDTIVDLTVIGLGRYIPRIARVAAQTELNIVVATGLYTYNDIPFRFHYEGPGGMLDGPEIMTDMFVRDIEQGIADTGIKAGILKCATDEPGITPGVERVLRAVAQAHKRTGVPISTHTHAGLRRGLEQQRIFEEEGVDLTRVIIGHSGDSTDVGYLEELISAGSYLGMDRFGLDVLLPFEERVQIVATMCERGHADKMVLSHDANCYFDALPEQLVPQMAPNWHYLHIHNDVIPALKHRGVTDEQIHTMLVENPRKIFDRQGAYQ

SEQ ID NO: 635 - protein, 326 aa, Artificial Sequence
  Synthetic
MSELNTARGTIDTADLGVTLMHEHVLIMTTEIALNYPEAWGDEEKRVADAVARLNELKSRGVDTIVDLTVIGLGRYIPRIARVAAQTELNIVVATGLYTYNDIPFRFHYEGPGGMLDGPEIMTDMFVRDIEQGIADTGIKAGILKCATDEPGITPGVERVLRAVAQAHKRTGVPISTHTHAGLRRGLEQQRIFEEEGVDLTRVIIGHSGDSTDVGYLEELISAGSYLGMDRFGLDVLLPFEERVQIVATMCERGHADKMVLSHDANCYFDALPEQLVPQMAPNWHYLHIHNDVIPALKHRGVTDEQIHTMLVENPRKIFDRQGAYQ

SEQ ID NO: 636 - protein, 326 aa, Artificial Sequence
  Synthetic
MSELNTARGTIDTADLGVTLMHEHVMIMTTEIALNYPEAWGDEEKRVADAVARLNELKSRGVDTIVDLTVIGLGRYIPRIARVAAQTELNIVVATGLYTYNDIPFRFHYEGPGGMLDGPEIMTDMFVRDIEQGIADTGIKAGILKCATDEPGITPGVERVLRAVAQAHKRTGVPISTHTHAGLRRGLEQQRIFEEEGVDLTRVIIGHSGDSTDVGYLEELISAGSYLGMDRFGLDVLLPFEERVQIVATMCERGHADKMVLSHDANCYFDALPEQLVPQMAPNWHYLHIHNDVIPALKHRGVTDEQIHTMLVENPRKIFDRQGAYQ

SEQ ID NO: 637 - protein, 326 aa, Artificial Sequence
  Synthetic
MSELNTARGTIDTADLGVTLMHEHVWIMTTEIALNYPEAWGDEEKRVADAVARLNELKSRGVDTIVDLTVIGLGRYIPRIARVAAQTELNIVVATGLYTYNDIPFRFHYEGPGGMLDGPEIMTDMFVRDIEQGIADTGIKAGILKCATDEPGITPGVERVLRAVAQAHKRTGVPISTHTHAGLRRGLEQQRIFEEEGVDLTRVIIGHSGDSTDVGYLEELISAGSYLGMDRFGLDVLLPFEERVQIVATMCERGHADKMVLSHDANCYFDALPEQLVPQMAPNWHYLHIHNDVIPALKHRGVTDEQIHTMLVENPRKIFDRQGAYQ

SEQ ID NO: 638 - protein, 326 aa, Artificial Sequence
  Synthetic
MSELNTARGTIDTADLGVTLMHEHVFCMTTEIALNYPEAWGDEEKRVADAVARLNELKSRGVDTIVDLTVIGLGRYIPRIARVAAQTELNIVVATGLYTYNDIPFRFHYEGPGGMLDGPEIMTDMFVRDIEQGIADTGIKAGILKCATDEPGITPGVERVLRAVAQAHKRTGVPISTHTHAGLRRGLEQQRIFEEEGVDLTRVIIGHSGDSTDVGYLEELISAGSYLGMDRFGLDVLLPFEERVQIVATMCERGHADKMVLSHDANCYFDALPEQLVPQMAPNWHYLHIHNDVIPALKHRGVTDEQIHTMLVENPRKIFDRQGAYQ

SEQ ID NO: 639 - protein, 326 aa, Artificial Sequence
  Synthetic
MSELNTARGTIDTADLGVTLMHEHVFFMTTEIALNYPEAWGDEEKRVADAVARLNELKSRGVDTIVDLTVIGLGRYIPRIARVAAQTELNIVVATGLYTYNDIPFRFHYEGPGGMLDGPEIMTDMFVRDIEQGIADTGIKAGILKCATDEPGITPGVERVLRAVAQAHKRTGVPISTHTHAGLRRGLEQQRIFEEEGVDLTRVIIGHSGDSTDVGYLEELISAGSYLGMDRFGLDVLLPFEERVQIVATMCERGHADKMVLSHDANCYFDALPEQLVPQMAPNWHYLHIHNDVIPALKHRGVTDEQIHTMLVENPRKIFDRQGAYQ

SEQ ID NO: 640 - protein, 326 aa, Artificial Sequence
  Synthetic
MSELNTARGTIDTADLGVTLMHEHVFMMTTEIALNYPEAWGDEEKRVADAVARLNELKSRGVDTIVDLTVIGLGRYIPRIARVAAQTELNIVVATGLYTYNDIPFRFHYEGPGGMLDGPEIMTDMFVRDIEQGIADTGIKAGILKCATDEPGITPGVERVLRAVAQAHKRTGVPISTHTHAGLRRGLEQQRIFEEEGVDLTRVIIGHSGDSTDVGYLEELISAGSYLGMDRFGLDVLLPFEERVQIVATMCERGHADKMVLSHDANCYFDALPEQLVPQMAPNWHYLHIHNDVIPALKHRGVTDEQIHTMLVENPRKIFDRQGAYQ

SEQ ID NO: 641 - protein, 326 aa, Artificial Sequence
  Synthetic
MSELNTARGTIDTADLGVTLMHEHVFTMTTEIALNYPEAWGDEEKRVADAVARLNELKSRGVDTIVDLTVIGLGRYIPRIARVAAQTELNIVVATGLYTYNDIPFRFHYEGPGGMLDGPEIMTDMFVRDIEQGIADTGIKAGILKCATDEPGITPGVERVLRAVAQAHKRTGVPISTHTHAGLRRGLEQQRIFEEEGVDLTRVIIGHSGDSTDVGYLEELISAGSYLGMDRFGLDVLLPFEERVQIVATMCERGHADKMVLSHDANCYFDALPEQLVPQMAPNWHYLHIHNDVIPALKHRGVTDEQIHTMLVENPRKIFDRQGAYQ

SEQ ID NO: 642 - protein, 326 aa, Artificial Sequence
  Synthetic
MSELNTARGTIDTADLGVTLMHEHVFVMTTEIALNYPEAWGDEEKRVADAVARLNELKSRGVDTIVDLTVIGLGRYIPRIARVAAQTELNIVVATGLYTYNDIPFRFHYEGPGGMLDGPEIMTDMFVRDIEQGIADTGIKAGILKCATDEPGITPGVERVLRAVAQAHKRTGVPISTHTHAGLRRGLEQQRIFEEEGVDLTRVIIGHSGDSTDVGYLEELISAGSYLGMDRFGLDVLLPFEERVQIVATMCERGHADKMVLSHDANCYFDALPEQLVPQMAPNWHYLHIHNDVIPALKHRGVTDEQIHTMLVENPRKIFDRQGAYQ

SEQ ID NO: 643 - protein, 326 aa, Artificial Sequence
  Synthetic
MSELNTARGTIDTADLGVTLMHEHVFWMTTEIALNYPEAWGDEEKRVADAVARLNELKSRGVDTIVDLTVIGLGRYIPRIARVAAQTELNIVVATGLYTYNDIPFRFHYEGPGGMLDGPEIMTDMFVRDIEQGIADTGIKAGILKCATDEPGITPGVERVLRAVAQAHKRTGVPISTHTHAGLRRGLEQQRIFEEEGVDLTRVIIGHSGDSTDVGYLEELISAGSYLGMDRFGLDVLLPFEERVQIVATMCERGHADKMVLSHDANCYFDALPEQLVPQMAPNWHYLHIHNDVIPALKHRGVTDEQIHTMLVENPRKIFDRQGAYQ

SEQ ID NO: 644 - protein, 326 aa, Artificial Sequence
  Synthetic
MSELNTARGTIDTADLGVTLMHEHVFYMTTEIALNYPEAWGDEEKRVADAVARLNELKSRGVDTIVDLTVIGLGRYIPRIARVAAQTELNIVVATGLYTYNDIPFRFHYEGPGGMLDGPEIMTDMFVRDIEQGIADTGIKAGILKCATDEPGITPGVERVLRAVAQAHKRTGVPISTHTHAGLRRGLEQQRIFEEEGVDLTRVIIGHSGDSTDVGYLEELISAGSYLGMDRFGLDVLLPFEERVQIVATMCERGHADKMVLSHDANCYFDALPEQLVPQMAPNWHYLHIHNDVIPALKHRGVTDEQIHTMLVENPRKIFDRQGAYQ

SEQ ID NO: 645 - protein, 326 aa, Artificial Sequence
  Synthetic
MSELNTARGTIDTADLGVTLMHEHVFIMTTEIALNYPEAWGDEEKRVADAVARLNELKSRGVDTIIDLTVIGLGRYIPRIARVAAQTELNIVVATGLYTYNDIPFRFHYEGPGGMLDGPEIMTDMFVRDIEQGIADTGIKAGILKCATDEPGITPGVERVLRAVAQAHKRTGVPISTHTHAGLRRGLEQQRIFEEEGVDLTRVIIGHSGDSTDVGYLEELISAGSYLGMDRFGLDVLLPFEERVQIVATMCERGHADKMVLSHDANCYFDALPEQLVPQMAPNWHYLHIHNDVIPALKHRGVTDEQIHTMLVENPRKIFDRQGAYQ

SEQ ID NO: 646 - protein, 326 aa, Artificial Sequence
  Synthetic
MSELNTARGTIDTADLGVTLMHEHVFIMTTEIALNYPEAWGDEEKRVADAVARLNELKSRGVDTIVDATVIGLGRYIPRIARVAAQTELNIVVATGLYTYNDIPFRFHYEGPGGMLDGPEIMTDMFVRDIEQGIADTGIKAGILKCATDEPGITPGVERVLRAVAQAHKRTGVPISTHTHAGLRRGLEQQRIFEEEGVDLTRVIIGHSGDSTDVGYLEELISAGSYLGMDRFGLDVLLPFEERVQIVATMCERGHADKMVLSHDANCYFDALPEQLVPQMAPNWHYLHIHNDVIPALKHRGVTDEQIHTMLVENPRKIFDRQGAYQ

SEQ ID NO: 647 - protein, 326 aa, Artificial Sequence
  Synthetic
MSELNTARGTIDTADLGVTLMHEHVFIMTTEIALNYPEAWGDEEKRVADAVARLNELKSRGVDTIVDCTVIGLGRYIPRIARVAAQTELNIVVATGLYTYNDIPFRFHYEGPGGMLDGPEIMTDMFVRDIEQGIADTGIKAGILKCATDEPGITPGVERVLRAVAQAHKRTGVPISTHTHAGLRRGLEQQRIFEEEGVDLTRVIIGHSGDSTDVGYLEELISAGSYLGMDRFGLDVLLPFEERVQIVATMCERGHADKMVLSHDANCYFDALPEQLVPQMAPNWHYLHIHNDVIPALKHRGVTDEQIHTMLVENPRKIFDRQGAYQ

SEQ ID NO: 648 - protein, 326 aa, Artificial Sequence
  Synthetic
MSELNTARGTIDTADLGVTLMHEHVFIMTTEIALNYPEAWGDEEKRVADAVARLNELKSRGVDTIVDMTVIGLGRYIPRIARVAAQTELNIVVATGLYTYNDIPFRFHYEGPGGMLDGPEIMTDMFVRDIEQGIADTGIKAGILKCATDEPGITPGVERVLRAVAQAHKRTGVPISTHTHAGLRRGLEQQRIFEEEGVDLTRVIIGHSGDSTDVGYLEELISAGSYLGMDRFGLDVLLPFEERVQIVATMCERGHADKMVLSHDANCYFDALPEQLVPQMAPNWHYLHIHNDVIPALKHRGVTDEQIHTMLVENPRKIFDRQGAYQ

SEQ ID NO: 649 - protein, 326 aa, Artificial Sequence
  Synthetic
MSELNTARGTIDTADLGVTLMHEHVFIMTTEIALNYPEAWGDEEKRVADAVARLNELKSRGVDTIVDNTVIGLGRYIPRIARVAAQTELNIVVATGLYTYNDIPFRFHYEGPGGMLDGPEIMTDMFVRDIEQGIADTGIKAGILKCATDEPGITPGVERVLRAVAQAHKRTGVPISTHTHAGLRRGLEQQRIFEEEGVDLTRVIIGHSGDSTDVGYLEELISAGSYLGMDRFGLDVLLPFEERVQIVATMCERGHADKMVLSHDANCYFDALPEQLVPQMAPNWHYLHIHNDVIPALKHRGVTDEQIHTMLVENPRKIFDRQGAYQ

SEQ ID NO: 650 - protein, 326 aa, Artificial Sequence
  Synthetic
MSELNTARGTIDTADLGVTLMHEHVFIMTTEIALNYPEAWGDEEKRVADAVARLNELKSRGVDTIVDLQVIGLGRYIPRIARVAAQTELNIVVATGLYTYNDIPFRFHYEGPGGMLDGPEIMTDMFVRDIEQGIADTGIKAGILKCATDEPGITPGVERVLRAVAQAHKRTGVPISTHTHAGLRRGLEQQRIFEEEGVDLTRVIIGHSGDSTDVGYLEELISAGSYLGMDRFGLDVLLPFEERVQIVATMCERGHADKMVLSHDANCYFDALPEQLVPQMAPNWHYLHIHNDVIPALKHRGVTDEQIHTMLVENPRKIFDRQGAYQ

SEQ ID NO: 651 - protein, 326 aa, Artificial Sequence
  Synthetic
MSELNTARGTIDTADLGVTLMHEHVFIMTTEIALNYPEAWGDEEKRVADAVARLNELKSRGVDTIVDLSVIGLGRYIPRIARVAAQTELNIVVATGLYTYNDIPFRFHYEGPGGMLDGPEIMTDMFVRDIEQGIADTGIKAGILKCATDEPGITPGVERVLRAVAQAHKRTGVPISTHTHAGLRRGLEQQRIFEEEGVDLTRVIIGHSGDSTDVGYLEELISAGSYLGMDRFGLDVLLPFEERVQIVATMCERGHADKMVLSHDANCYFDALPEQLVPQMAPNWHYLHIHNDVIPALKHRGVTDEQIHTMLVENPRKIFDRQGAYQ

SEQ ID NO: 652 - protein, 326 aa, Artificial Sequence
  Synthetic
MSELNTARGTIDTADLGVTLMHEHVFIMTTEIALNYPEAWGDEEKRVADAVARLNELKSRGVDTIVDLTVIGCGRYIPRIARVAAQTELNIVVATGLYTYNDIPFRFHYEGPGGMLDGPEIMTDMFVRDIEQGIADTGIKAGILKCATDEPGITPGVERVLRAVAQAHKRTGVPISTHTHAGLRRGLEQQRIFEEEGVDLTRVIIGHSGDSTDVGYLEELISAGSYLGMDRFGLDVLLPFEERVQIVATMCERGHADKMVLSHDANCYFDALPEQLVPQMAPNWHYLHIHNDVIPALKHRGVTDEQIHTMLVENPRKIFDRQGAYQ

SEQ ID NO: 653 - protein, 326 aa, Artificial Sequence
  Synthetic
MSELNTARGTIDTADLGVTLMHEHVFIMTTEIALNYPEAWGDEEKRVADAVARLNELKSRGVDTIVDLTVIGMGRYIPRIARVAAQTELNIVVATGLYTYNDIPFRFHYEGPGGMLDGPEIMTDMFVRDIEQGIADTGIKAGILKCATDEPGITPGVERVLRAVAQAHKRTGVPISTHTHAGLRRGLEQQRIFEEEGVDLTRVIIGHSGDSTDVGYLEELISAGSYLGMDRFGLDVLLPFEERVQIVATMCERGHADKMVLSHDANCYFDALPEQLVPQMAPNWHYLHIHNDVIPALKHRGVTDEQIHTMLVENPRKIFDRQGAYQ

SEQ ID NO: 654 - protein, 326 aa, Artificial Sequence
  Synthetic
MSELNTARGTIDTADLGVTLMHEHVFIMTTEIALNYPEAWGDEEKRVADAVARLNELKSRGVDTIVDLTVIGLGRYIPRIARVAAQTELNIVVATGLCTYNDIPFRFHYEGPGGMLDGPEIMTDMFVRDIEQGIADTGIKAGILKCATDEPGITPGVERVLRAVAQAHKRTGVPISTHTHAGLRRGLEQQRIFEEEGVDLTRVIIGHSGDSTDVGYLEELISAGSYLGMDRFGLDVLLPFEERVQIVATMCERGHADKMVLSHDANCYFDALPEQLVPQMAPNWHYLHIHNDVIPALKHRGVTDEQIHTMLVENPRKIFDRQGAYQ

SEQ ID NO: 655 - protein, 326 aa, Artificial Sequence
  Synthetic
MSELNTARGTIDTADLGVTLMHEHVFIMTTEIALNYPEAWGDEEKRVADAVARLNELKSRGVDTIVDLTVIGLGRYIPRIARVAAQTELNIVVATGLWTYNDIPFRFHYEGPGGMLDGPEIMTDMFVRDIEQGIADTGIKAGILKCATDEPGITPGVERVLRAVAQAHKRTGVPISTHTHAGLRRGLEQQRIFEEEGVDLTRVIIGHSGDSTDVGYLEELISAGSYLGMDRFGLDVLLPFEERVQIVATMCERGHADKMVLSHDANCYFDALPEQLVPQMAPNWHYLHIHNDVIPALKHRGVTDEQIHTMLVENPRKIFDRQGAYQ

SEQ ID NO: 656 - protein, 326 aa, Artificial Sequence
  Synthetic
MSELNTARGTIDTADLGVTLMHEHVFIMTTEIALNYPEAWGDEEKRVADAVARLNELKSRGVDTIVDLTVIGLGRYIPRIARVAAQTELNIVVATGLYTYNDIPFRFHYEGPGGMLDGPEIMTDMCVRDIEQGIADTGIKAGILKCATDEPGITPGVERVLRAVAQAHKRTGVPISTHTHAGLRRGLEQQRIFEEEGVDLTRVIIGHSGDSTDVGYLEELISAGSYLGMDRFGLDVLLPFEERVQIVATMCERGHADKMVLSHDANCYFDALPEQLVPQMAPNWHYLHIHNDVIPALKHRGVTDEQIHTMLVENPRKIFDRQGAYQ

SEQ ID NO: 657 - protein, 326 aa, Artificial Sequence
  Synthetic
MSELNTARGTIDTADLGVTLMHEHVFIMTTEIALNYPEAWGDEEKRVADAVARLNELKSRGVDTIVDLTVIGLGRYIPRIARVAAQTELNIVVATGLYTYNDIPFRFHYEGPGGMLDGPEIMTDMLVRDIEQGIADTGIKAGILKCATDEPGITPGVERVLRAVAQAHKRTGVPISTHTHAGLRRGLEQQRIFEEEGVDLTRVIIGHSGDSTDVGYLEELISAGSYLGMDRFGLDVLLPFEERVQIVATMCERGHADKMVLSHDANCYFDALPEQLVPQMAPNWHYLHIHNDVIPALKHRGVTDEQIHTMLVENPRKIFDRQGAYQ

SEQ ID NO: 658 - protein, 326 aa, Artificial Sequence
  Synthetic
MSELNTARGTIDTADLGVTLMHEHVFIMTTEIALNYPEAWGDEEKRVADAVARLNELKSRGVDTIVDLTVIGLGRYIPRIARVAAQTELNIVVATGLYTYNDIPFRFHYEGPGGMLDGPEIMTDMMVRDIEQGIADTGIKAGILKCATDEPGITPGVERVLRAVAQAHKRTGVPISTHTHAGLRRGLEQQRIFEEEGVDLTRVIIGHSGDSTDVGYLEELISAGSYLGMDRFGLDVLLPFEERVQIVATMCERGHADKMVLSHDANCYFDALPEQLVPQMAPNWHYLHIHNDVIPALKHRGVTDEQIHTMLVENPRKIFDRQGAYQ

SEQ ID NO: 659 - protein, 326 aa, Artificial Sequence
  Synthetic
MSELNTARGTIDTADLGVTLMHEHVFIMTTEIALNYPEAWGDEEKRVADAVARLNELKSRGVDTIVDLTVIGLGRYIPRIARVAAQTELNIVVATGLYTYNDIPFRFHYEGPGGMLDGPEIMTDMFVRDIEQGIADTGIKAGIIKCATDEPGITPGVERVLRAVAQAHKRTGVPISTHTHAGLRRGLEQQRIFEEEGVDLTRVIIGHSGDSTDVGYLEELISAGSYLGMDRFGLDVLLPFEERVQIVATMCERGHADKMVLSHDANCYFDALPEQLVPQMAPNWHYLHIHNDVIPALKHRGVTDEQIHTMLVENPRKIFDRQGAYQ

SEQ ID NO: 660 - protein, 326 aa, Artificial Sequence
  Synthetic
MSELNTARGTIDTADLGVTLMHEHVFIMTTEIALNYPEAWGDEEKRVADAVARLNELKSRGVDTIVDLTVIGLGRYIPRIARVAAQTELNIVVATGLYTYNDIPFRFHYEGPGGMLDGPEIMTDMFVRDIEQGIADTGIKAGILCCATDEPGITPGVERVLRAVAQAHKRTGVPISTHTHAGLRRGLEQQRIFEEEGVDLTRVIIGHSGDSTDVGYLEELISAGSYLGMDRFGLDVLLPFEERVQIVATMCERGHADKMVLSHDANCYFDALPEQLVPQMAPNWHYLHIHNDVIPALKHRGVTDEQIHTMLVENPRKIFDRQGAYQ

SEQ ID NO: 661 - protein, 326 aa, Artificial Sequence
  Synthetic
MSELNTARGTIDTADLGVTLMHEHVFIMTTEIALNYPEAWGDEEKRVADAVARLNELKSRGVDTIVDLTVIGLGRYIPRIARVAAQTELNIVVATGLYTYNDIPFRFHYEGPGGMLDGPEIMTDMFVRDIEQGIADTGIKAGILECATDEPGITPGVERVLRAVAQAHKRTGVPISTHTHAGLRRGLEQQRIFEEEGVDLTRVIIGHSGDSTDVGYLEELISAGSYLGMDRFGLDVLLPFEERVQIVATMCERGHADKMVLSHDANCYFDALPEQLVPQMAPNWHYLHIHNDVIPALKHRGVTDEQIHTMLVENPRKIFDRQGAYQ

SEQ ID NO: 662 - protein, 326 aa, Artificial Sequence
  Synthetic
MSELNTARGTIDTADLGVTLMHEHVFIMTTEIALNYPEAWGDEEKRVADAVARLNELKSRGVDTIVDLTVIGLGRYIPRIARVAAQTELNIVVATGLYTYNDIPFRFHYEGPGGMLDGPEIMTDMFVRDIEQGIADTGIKAGILQCATDEPGITPGVERVLRAVAQAHKRTGVPISTHTHAGLRRGLEQQRIFEEEGVDLTRVIIGHSGDSTDVGYLEELISAGSYLGMDRFGLDVLLPFEERVQIVATMCERGHADKMVLSHDANCYFDALPEQLVPQMAPNWHYLHIHNDVIPALKHRGVTDEQIHTMLVENPRKIFDRQGAYQ

SEQ ID NO: 663 - protein, 326 aa, Artificial Sequence
  Synthetic
MSELNTARGTIDTADLGVTLMHEHVFIMTTEIALNYPEAWGDEEKRVADAVARLNELKSRGVDTIVDLTVIGLGRYIPRIARVAAQTELNIVVATGLYTYNDIPFRFHYEGPGGMLDGPEIMTDMFVRDIEQGIADTGIKAGILRCATDEPGITPGVERVLRAVAQAHKRTGVPISTHTHAGLRRGLEQQRIFEEEGVDLTRVIIGHSGDSTDVGYLEELISAGSYLGMDRFGLDVLLPFEERVQIVATMCERGHADKMVLSHDANCYFDALPEQLVPQMAPNWHYLHIHNDVIPALKHRGVTDEQIHTMLVENPRKIFDRQGAYQ

SEQ ID NO: 664 - protein, 326 aa, Artificial Sequence
  Synthetic
MSELNTARGTIDTADLGVTLMHEHVFIMTTEIALNYPEAWGDEEKRVADAVARLNELKSRGVDTIVDLTVIGLGRYIPRIARVAAQTELNIVVATGLYTYNDIPFRFHYEGPGGMLDGPEIMTDMFVRDIEQGIADTGIKAGILSCATDEPGITPGVERVLRAVAQAHKRTGVPISTHTHAGLRRGLEQQRIFEEEGVDLTRVIIGHSGDSTDVGYLEELISAGSYLGMDRFGLDVLLPFEERVQIVATMCERGHADKMVLSHDANCYFDALPEQLVPQMAPNWHYLHIHNDVIPALKHRGVTDEQIHTMLVENPRKIFDRQGAYQ

SEQ ID NO: 665 - protein, 326 aa, Artificial Sequence
  Synthetic
MSELNTARGTIDTADLGVTLMHEHVFIMTTEIALNYPEAWGDEEKRVADAVARLNELKSRGVDTIVDLTVIGLGRYIPRIARVAAQTELNIVVATGLYTYNDIPFRFHYEGPGGMLDGPEIMTDMFVRDIEQGIADTGIKAGILTCATDEPGITPGVERVLRAVAQAHKRTGVPISTHTHAGLRRGLEQQRIFEEEGVDLTRVIIGHSGDSTDVGYLEELISAGSYLGMDRFGLDVLLPFEERVQIVATMCERGHADKMVLSHDANCYFDALPEQLVPQMAPNWHYLHIHNDVIPALKHRGVTDEQIHTMLVENPRKIFDRQGAYQ

SEQ ID NO: 666 - protein, 326 aa, Artificial Sequence
  Synthetic
MSELNTARGTIDTADLGVTLMHEHVFIMTTEIALNYPEAWGDEEKRVADAVARLNELKSRGVDTIVDLTVIGLGRYIPRIARVAAQTELNIVVATGLYTYNDIPFRFHYEGPGGMLDGPEIMTDMFVRDIEQGIADTGIKAGILKFATDEPGITPGVERVLRAVAQAHKRTGVPISTHTHAGLRRGLEQQRIFEEEGVDLTRVIIGHSGDSTDVGYLEELISAGSYLGMDRFGLDVLLPFEERVQIVATMCERGHADKMVLSHDANCYFDALPEQLVPQMAPNWHYLHIHNDVIPALKHRGVTDEQIHTMLVENPRKIFDRQGAYQ

SEQ ID NO: 667 - protein, 326 aa, Artificial Sequence
  Synthetic
MSELNTARGTIDTADLGVTLMHEHVFIMTTEIALNYPEAWGDEEKRVADAVARLNELKSRGVDTIVDLTVIGLGRYIPRIARVAAQTELNIVVATGLYTYNDIPFRFHYEGPGGMLDGPEIMTDMFVRDIEQGIADTGIKAGILKIATDEPGITPGVERVLRAVAQAHKRTGVPISTHTHAGLRRGLEQQRIFEEEGVDLTRVIIGHSGDSTDVGYLEELISAGSYLGMDRFGLDVLLPFEERVQIVATMCERGHADKMVLSHDANCYFDALPEQLVPQMAPNWHYLHIHNDVIPALKHRGVTDEQIHTMLVENPRKIFDRQGAYQ

SEQ ID NO: 668 - protein, 326 aa, Artificial Sequence
  Synthetic
MSELNTARGTIDTADLGVTLMHEHVFIMTTEIALNYPEAWGDEEKRVADAVARLNELKSRGVDTIVDLTVIGLGRYIPRIARVAAQTELNIVVATGLYTYNDIPFRFHYEGPGGMLDGPEIMTDMFVRDIEQGIADTGIKAGILKVATDEPGITPGVERVLRAVAQAHKRTGVPISTHTHAGLRRGLEQQRIFEEEGVDLTRVIIGHSGDSTDVGYLEELISAGSYLGMDRFGLDVLLPFEERVQIVATMCERGHADKMVLSHDANCYFDALPEQLVPQMAPNWHYLHIHNDVIPALKHRGVTDEQIHTMLVENPRKIFDRQGAYQ

SEQ ID NO: 669 - protein, 326 aa, Artificial Sequence
  Synthetic
MSELNTARGTIDTADLGVTLMHEHVFIMTTEIALNYPEAWGDEEKRVADAVARLNELKSRGVDTIVDLTVIGLGRYIPRIARVAAQTELNIVVATGLYTYNDIPFRFHYEGPGGMLDGPEIMTDMFVRDIEQGIADTGIKAGILKCGTDEPGITPGVERVLRAVAQAHKRTGVPISTHTHAGLRRGLEQQRIFEEEGVDLTRVIIGHSGDSTDVGYLEELISAGSYLGMDRFGLDVLLPFEERVQIVATMCERGHADKMVLSHDANCYFDALPEQLVPQMAPNWHYLHIHNDVIPALKHRGVTDEQIHTMLVENPRKIFDRQGAYQ

SEQ ID NO: 670 - protein, 326 aa, Artificial Sequence
  Synthetic
MSELNTARGTIDTADLGVTLMHEHVFIMTTEIALNYPEAWGDEEKRVADAVARLNELKSRGVDTIVDLTVIGLGRYIPRIARVAAQTELNIVVATGLYTYNDIPFRFHYEGPGGMLDGPEIMTDMFVRDIEQGIADTGIKAGILKCITDEPGITPGVERVLRAVAQAHKRTGVPISTHTHAGLRRGLEQQRIFEEEGVDLTRVIIGHSGDSTDVGYLEELISAGSYLGMDRFGLDVLLPFEERVQIVATMCERGHADKMVLSHDANCYFDALPEQLVPQMAPNWHYLHIHNDVIPALKHRGVTDEQIHTMLVENPRKIFDRQGAYQ

SEQ ID NO: 671 - protein, 326 aa, Artificial Sequence
  Synthetic
MSELNTARGTIDTADLGVTLMHEHVFIMTTEIALNYPEAWGDEEKRVADAVARLNELKSRGVDTIVDLTVIGLGRYIPRIARVAAQTELNIVVATGLYTYNDIPFRFHYEGPGGMLDGPEIMTDMFVRDIEQGIADTGIKAGILKCMTDEPGITPGVERVLRAVAQAHKRTGVPISTHTHAGLRRGLEQQRIFEEEGVDLTRVIIGHSGDSTDVGYLEELISAGSYLGMDRFGLDVLLPFEERVQIVATMCERGHADKMVLSHDANCYFDALPEQLVPQMAPNWHYLHIHNDVIPALKHRGVTDEQIHTMLVENPRKIFDRQGAYQ

SEQ ID NO: 672 - protein, 326 aa, Artificial Sequence
  Synthetic
MSELNTARGTIDTADLGVTLMHEHVFIMTTEIALNYPEAWGDEEKRVADAVARLNELKSRGVDTIVDLTVIGLGRYIPRIARVAAQTELNIVVATGLYTYNDIPFRFHYEGPGGMLDGPEIMTDMFVRDIEQGIADTGIKAGILKCSTDEPGITPGVERVLRAVAQAHKRTGVPISTHTHAGLRRGLEQQRIFEEEGVDLTRVIIGHSGDSTDVGYLEELISAGSYLGMDRFGLDVLLPFEERVQIVATMCERGHADKMVLSHDANCYFDALPEQLVPQMAPNWHYLHIHNDVIPALKHRGVTDEQIHTMLVENPRKIFDRQGAYQ

SEQ ID NO: 673 - protein, 326 aa, Artificial Sequence
  Synthetic
MSELNTARGTIDTADLGVTLMHEHVFIMTTEIALNYPEAWGDEEKRVADAVARLNELKSRGVDTIVDLTVIGLGRYIPRIARVAAQTELNIVVATGLYTYNDIPFRFHYEGPGGMLDGPEIMTDMFVRDIEQGIADTGIKAGILKCACDEPGITPGVERVLRAVAQAHKRTGVPISTHTHAGLRRGLEQQRIFEEEGVDLTRVIIGHSGDSTDVGYLEELISAGSYLGMDRFGLDVLLPFEERVQIVATMCERGHADKMVLSHDANCYFDALPEQLVPQMAPNWHYLHIHNDVIPALKHRGVTDEQIHTMLVENPRKIFDRQGAYQ

SEQ ID NO: 674 - protein, 326 aa, Artificial Sequence
  Synthetic
MSELNTARGTIDTADLGVTLMHEHVFIMTTEIALNYPEAWGDEEKRVADAVARLNELKSRGVDTIVDLTVIGLGRYIPRIARVAAQTELNIVVATGLYTYNDIPFRFHYEGPGGMLDGPEIMTDMFVRDIEQGIADTGIKAGILKCAIDEPGITPGVERVLRAVAQAHKRTGVPISTHTHAGLRRGLEQQRIFEEEGVDLTRVIIGHSGDSTDVGYLEELISAGSYLGMDRFGLDVLLPFEERVQIVATMCERGHADKMVLSHDANCYFDALPEQLVPQMAPNWHYLHIHNDVIPALKHRGVTDEQIHTMLVENPRKIFDRQGAYQ

SEQ ID NO: 675 - protein, 326 aa, Artificial Sequence
  Synthetic
MSELNTARGTIDTADLGVTLMHEHVFIMTTEIALNYPEAWGDEEKRVADAVARLNELKSRGVDTIVDLTVIGLGRYIPRIARVAAQTELNIVVATGLYTYNDIPFRFHYEGPGGMLDGPEIMTDMFVRDIEQGIADTGIKAGILKCAMDEPGITPGVERVLRAVAQAHKRTGVPISTHTHAGLRRGLEQQRIFEEEGVDLTRVIIGHSGDSTDVGYLEELISAGSYLGMDRFGLDVLLPFEERVQIVATMCERGHADKMVLSHDANCYFDALPEQLVPQMAPNWHYLHIHNDVIPALKHRGVTDEQIHTMLVENPRKIFDRQGAYQ

SEQ ID NO: 676 - protein, 326 aa, Artificial Sequence
  Synthetic
MSELNTARGTIDTADLGVTLMHEHVFIMTTEIALNYPEAWGDEEKRVADAVARLNELKSRGVDTIVDLTVIGLGRYIPRIARVAAQTELNIVVATGLYTYNDIPFRFHYEGPGGMLDGPEIMTDMFVRDIEQGIADTGIKAGILKCAVDEPGITPGVERVLRAVAQAHKRTGVPISTHTHAGLRRGLEQQRIFEEEGVDLTRVIIGHSGDSTDVGYLEELISAGSYLGMDRFGLDVLLPFEERVQIVATMCERGHADKMVLSHDANCYFDALPEQLVPQMAPNWHYLHIHNDVIPALKHRGVTDEQIHTMLVENPRKIFDRQGAYQ

SEQ ID NO: 677 - protein, 326 aa, Artificial Sequence
  Synthetic
MSELNTARGTIDTADLGVTLMHEHVFIMTTEIALNYPEAWGDEEKRVADAVARLNELKSRGVDTIVDLTVIGLGRYIPRIARVAAQTELNIVVATGLYTYNDIPFRFHYEGPGGMLDGPEIMTDMFVRDIEQGIADTGIKAGILKCAWDEPGITPGVERVLRAVAQAHKRTGVPISTHTHAGLRRGLEQQRIFEEEGVDLTRVIIGHSGDSTDVGYLEELISAGSYLGMDRFGLDVLLPFEERVQIVATMCERGHADKMVLSHDANCYFDALPEQLVPQMAPNWHYLHIHNDVIPALKHRGVTDEQIHTMLVENPRKIFDRQGAYQ

SEQ ID NO: 678 - protein, 326 aa, Artificial Sequence
  Synthetic
MSELNTARGTIDTADLGVTLMHEHVFIMTTEIALNYPEAWGDEEKRVADAVARLNELKSRGVDTIVDLTVIGLGRYIPRIARVAAQTELNIVVATGLYTYNDIPFRFHYEGPGGMLDGPEIMTDMFVRDIEQGIADTGIKAGILKCAYDEPGITPGVERVLRAVAQAHKRTGVPISTHTHAGLRRGLEQQRIFEEEGVDLTRVIIGHSGDSTDVGYLEELISAGSYLGMDRFGLDVLLPFEERVQIVATMCERGHADKMVLSHDANCYFDALPEQLVPQMAPNWHYLHIHNDVIPALKHRGVTDEQIHTMLVENPRKIFDRQGAYQ

SEQ ID NO: 679 - protein, 326 aa, Artificial Sequence
  Synthetic
MSELNTARGTIDTADLGVTLMHEHVFIMTTEIALNYPEAWGDEEKRVADAVARLNELKSRGVDTIVDLTVIGLGRYIPRIARVAAQTELNIVVATGLYTYNDIPFRFHYEGPGGMLDGPEIMTDMFVRDIEQGIADTGIKAGILKCATDEPGITPGVERVLRAIAQAHKRTGVPISTHTHAGLRRGLEQQRIFEEEGVDLTRVIIGHSGDSTDVGYLEELISAGSYLGMDRFGLDVLLPFEERVQIVATMCERGHADKMVLSHDANCYFDALPEQLVPQMAPNWHYLHIHNDVIPALKHRGVTDEQIHTMLVENPRKIFDRQGAYQ

SEQ ID NO: 680 - protein, 326 aa, Artificial Sequence
  Synthetic
MSELNTARGTIDTADLGVTLMHEHVFIMTTEIALNYPEAWGDEEKRVADAVARLNELKSRGVDTIVDLTVIGLGRYIPRIARVAAQTELNIVVATGLYTYNDIPFRFHYEGPGGMLDGPEIMTDMFVRDIEQGIADTGIKAGILKCATDEPGITPGVERVLRATAQAHKRTGVPISTHTHAGLRRGLEQQRIFEEEGVDLTRVIIGHSGDSTDVGYLEELISAGSYLGMDRFGLDVLLPFEERVQIVATMCERGHADKMVLSHDANCYFDALPEQLVPQMAPNWHYLHIHNDVIPALKHRGVTDEQIHTMLVENPRKIFDRQGAYQ

SEQ ID NO: 681 - protein, 326 aa, Artificial Sequence
  Synthetic
MSELNTARGTIDTADLGVTLMHEHVFIMTTEIALNYPEAWGDEEKRVADAVARLNELKSRGVDTIVDLTVIGLGRYIPRIARVAAQTELNIVVATGLYTYNDIPFRFHYEGPGGMLDGPEIMTDMFVRDIEQGIADTGIKAGILKCATDEPGITPGVERVLRAVAQASKRTGVPISTHTHAGLRRGLEQQRIFEEEGVDLTRVIIGHSGDSTDVGYLEELISAGSYLGMDRFGLDVLLPFEERVQIVATMCERGHADKMVLSHDANCYFDALPEQLVPQMAPNWHYLHIHNDVIPALKHRGVTDEQIHTMLVENPRKIFDRQGAYQ

SEQ ID NO: 682 - protein, 326 aa, Artificial Sequence
  Synthetic
MSELNTARGTIDTADLGVTLMHEHVFIMTTEIALNYPEAWGDEEKRVADAVARLNELKSRGVDTIVDLTVIGLGRYIPRIARVAAQTELNIVVATGLYTYNDIPFRFHYEGPGGMLDGPEIMTDMFVRDIEQGIADTGIKAGILKCATDEPGITPGVERVLRAVAQAHKRTGCPISTHTHAGLRRGLEQQRIFEEEGVDLTRVIIGHSGDSTDVGYLEELISAGSYLGMDRFGLDVLLPFEERVQIVATMCERGHADKMVLSHDANCYFDALPEQLVPQMAPNWHYLHIHNDVIPALKHRGVTDEQIHTMLVENPRKIFDRQGAYQ

SEQ ID NO: 683 - protein, 326 aa, Artificial Sequence
  Synthetic
MSELNTARGTIDTADLGVTLMHEHVFIMTTEIALNYPEAWGDEEKRVADAVARLNELKSRGVDTIVDLTVIGLGRYIPRIARVAAQTELNIVVATGLYTYNDIPFRFHYEGPGGMLDGPEIMTDMFVRDIEQGIADTGIKAGILKCATDEPGITPGVERVLRAVAQAHKRTGVPIFTHTHAGLRRGLEQQRIFEEEGVDLTRVIIGHSGDSTDVGYLEELISAGSYLGMDRFGLDVLLPFEERVQIVATMCERGHADKMVLSHDANCYFDALPEQLVPQMAPNWHYLHIHNDVIPALKHRGVTDEQIHTMLVENPRKIFDRQGAYQ

SEQ ID NO: 684 - protein, 326 aa, Artificial Sequence
  Synthetic
MSELNTARGTIDTADLGVTLMHEHVFIMTTEIALNYPEAWGDEEKRVADAVARLNELKSRGVDTIVDLTVIGLGRYIPRIARVAAQTELNIVVATGLYTYNDIPFRFHYEGPGGMLDGPEIMTDMFVRDIEQGIADTGIKAGILKCATDEPGITPGVERVLRAVAQAHKRTGVPIHTHTHAGLRRGLEQQRIFEEEGVDLTRVIIGHSGDSTDVGYLEELISAGSYLGMDRFGLDVLLPFEERVQIVATMCERGHADKMVLSHDANCYFDALPEQLVPQMAPNWHYLHIHNDVIPALKHRGVTDEQIHTMLVENPRKIFDRQGAYQ

SEQ ID NO: 685 - protein, 326 aa, Artificial Sequence
  Synthetic
MSELNTARGTIDTADLGVTLMHEHVFIMTTEIALNYPEAWGDEEKRVADAVARLNELKSRGVDTIVDLTVIGLGRYIPRIARVAAQTELNIVVATGLYTYNDIPFRFHYEGPGGMLDGPEIMTDMFVRDIEQGIADTGIKAGILKCATDEPGITPGVERVLRAVAQAHKRTGVPIITHTHAGLRRGLEQQRIFEEEGVDLTRVIIGHSGDSTDVGYLEELISAGSYLGMDRFGLDVLLPFEERVQIVATMCERGHADKMVLSHDANCYFDALPEQLVPQMAPNWHYLHIHNDVIPALKHRGVTDEQIHTMLVENPRKIFDRQGAYQ

SEQ ID NO: 686 - protein, 326 aa, Artificial Sequence
  Synthetic
MSELNTARGTIDTADLGVTLMHEHVFIMTTEIALNYPEAWGDEEKRVADAVARLNELKSRGVDTIVDLTVIGLGRYIPRIARVAAQTELNIVVATGLYTYNDIPFRFHYEGPGGMLDGPEIMTDMFVRDIEQGIADTGIKAGILKCATDEPGITPGVERVLRAVAQAHKRTGVPILTHTHAGLRRGLEQQRIFEEEGVDLTRVIIGHSGDSTDVGYLEELISAGSYLGMDRFGLDVLLPFEERVQIVATMCERGHADKMVLSHDANCYFDALPEQLVPQMAPNWHYLHIHNDVIPALKHRGVTDEQIHTMLVENPRKIFDRQGAYQ

SEQ ID NO: 687 - protein, 326 aa, Artificial Sequence
  Synthetic
MSELNTARGTIDTADLGVTLMHEHVFIMTTEIALNYPEAWGDEEKRVADAVARLNELKSRGVDTIVDLTVIGLGRYIPRIARVAAQTELNIVVATGLYTYNDIPFRFHYEGPGGMLDGPEIMTDMFVRDIEQGIADTGIKAGILKCATDEPGITPGVERVLRAVAQAHKRTGVPIMTHTHAGLRRGLEQQRIFEEEGVDLTRVIIGHSGDSTDVGYLEELISAGSYLGMDRFGLDVLLPFEERVQIVATMCERGHADKMVLSHDANCYFDALPEQLVPQMAPNWHYLHIHNDVIPALKHRGVTDEQIHTMLVENPRKIFDRQGAYQ

SEQ ID NO: 688 - protein, 326 aa, Artificial Sequence
  Synthetic
MSELNTARGTIDTADLGVTLMHEHVFIMTTEIALNYPEAWGDEEKRVADAVARLNELKSRGVDTIVDLTVIGLGRYIPRIARVAAQTELNIVVATGLYTYNDIPFRFHYEGPGGMLDGPEIMTDMFVRDIEQGIADTGIKAGILKCATDEPGITPGVERVLRAVAQAHKRTGVPITTHTHAGLRRGLEQQRIFEEEGVDLTRVIIGHSGDSTDVGYLEELISAGSYLGMDRFGLDVLLPFEERVQIVATMCERGHADKMVLSHDANCYFDALPEQLVPQMAPNWHYLHIHNDVIPALKHRGVTDEQIHTMLVENPRKIFDRQGAYQ

SEQ ID NO: 689 - protein, 326 aa, Artificial Sequence
  Synthetic
MSELNTARGTIDTADLGVTLMHEHVFIMTTEIALNYPEAWGDEEKRVADAVARLNELKSRGVDTIVDLTVIGLGRYIPRIARVAAQTELNIVVATGLYTYNDIPFRFHYEGPGGMLDGPEIMTDMFVRDIEQGIADTGIKAGILKCATDEPGITPGVERVLRAVAQAHKRTGVPIWTHTHAGLRRGLEQQRIFEEEGVDLTRVIIGHSGDSTDVGYLEELISAGSYLGMDRFGLDVLLPFEERVQIVATMCERGHADKMVLSHDANCYFDALPEQLVPQMAPNWHYLHIHNDVIPALKHRGVTDEQIHTMLVENPRKIFDRQGAYQ

SEQ ID NO: 690 - protein, 326 aa, Artificial Sequence
  Synthetic
MSELNTARGTIDTADLGVTLMHEHVFIMTTEIALNYPEAWGDEEKRVADAVARLNELKSRGVDTIVDLTVIGLGRYIPRIARVAAQTELNIVVATGLYTYNDIPFRFHYEGPGGMLDGPEIMTDMFVRDIEQGIADTGIKAGILKCATDEPGITPGVERVLRAVAQAHKRTGVPIYTHTHAGLRRGLEQQRIFEEEGVDLTRVIIGHSGDSTDVGYLEELISAGSYLGMDRFGLDVLLPFEERVQIVATMCERGHADKMVLSHDANCYFDALPEQLVPQMAPNWHYLHIHNDVIPALKHRGVTDEQIHTMLVENPRKIFDRQGAYQ

SEQ ID NO: 691 - protein, 326 aa, Artificial Sequence
  Synthetic
MSELNTARGTIDTADLGVTLMHEHVFIMTTEIALNYPEAWGDEEKRVADAVARLNELKSRGVDTIVDLTVIGLGRYIPRIARVAAQTELNIVVATGLYTYNDIPFRFHYEGPGGMLDGPEIMTDMFVRDIEQGIADTGIKAGILKCATDEPGITPGVERVLRAVAQAHKRTGVPISCHTHAGLRRGLEQQRIFEEEGVDLTRVIIGHSGDSTDVGYLEELISAGSYLGMDRFGLDVLLPFEERVQIVATMCERGHADKMVLSHDANCYFDALPEQLVPQMAPNWHYLHIHNDVIPALKHRGVTDEQIHTMLVENPRKIFDRQGAYQ

SEQ ID NO: 692 - protein, 326 aa, Artificial Sequence
  Synthetic
MSELNTARGTIDTADLGVTLMHEHVFIMTTEIALNYPEAWGDEEKRVADAVARLNELKSRGVDTIVDLTVIGLGRYIPRIARVAAQTELNIVVATGLYTYNDIPFRFHYEGPGGMLDGPEIMTDMFVRDIEQGIADTGIKAGILKCATDEPGITPGVERVLRAVAQAHKRTGVPISIHTHAGLRRGLEQQRIFEEEGVDLTRVIIGHSGDSTDVGYLEELISAGSYLGMDRFGLDVLLPFEERVQIVATMCERGHADKMVLSHDANCYFDALPEQLVPQMAPNWHYLHIHNDVIPALKHRGVTDEQIHTMLVENPRKIFDRQGAYQ

SEQ ID NO: 693 - protein, 326 aa, Artificial Sequence
  Synthetic
MSELNTARGTIDTADLGVTLMHEHVFIMTTEIALNYPEAWGDEEKRVADAVARLNELKSRGVDTIVDLTVIGLGRYIPRIARVAAQTELNIVVATGLYTYNDIPFRFHYEGPGGMLDGPEIMTDMFVRDIEQGIADTGIKAGILKCATDEPGITPGVERVLRAVAQAHKRTGVPISVHTHAGLRRGLEQQRIFEEEGVDLTRVIIGHSGDSTDVGYLEELISAGSYLGMDRFGLDVLLPFEERVQIVATMCERGHADKMVLSHDANCYFDALPEQLVPQMAPNWHYLHIHNDVIPALKHRGVTDEQIHTMLVENPRKIFDRQGAYQ

SEQ ID NO: 694 - protein, 326 aa, Artificial Sequence
  Synthetic
MSELNTARGTIDTADLGVTLMHEHVFIMTTEIALNYPEAWGDEEKRVADAVARLNELKSRGVDTIVDLTVIGLGRYIPRIARVAAQTELNIVVATGLYTYNDIPFRFHYEGPGGMLDGPEIMTDMFVRDIEQGIADTGIKAGILKCATDEPGITPGVERVLRAVAQAHKRTGVPISTDTHAGLRRGLEQQRIFEEEGVDLTRVIIGHSGDSTDVGYLEELISAGSYLGMDRFGLDVLLPFEERVQIVATMCERGHADKMVLSHDANCYFDALPEQLVPQMAPNWHYLHIHNDVIPALKHRGVTDEQIHTMLVENPRKIFDRQGAYQ

SEQ ID NO: 695 - protein, 326 aa, Artificial Sequence
  Synthetic
MSELNTARGTIDTADLGVTLMHEHVFIMTTEIALNYPEAWGDEEKRVADAVARLNELKSRGVDTIVDLTVIGLGRYIPRIARVAAQTELNIVVATGLYTYNDIPFRFHYEGPGGMLDGPEIMTDMFVRDIEQGIADTGIKAGILKCATDEPGITPGVERVLRAVAQAHKRTGVPISTQTHAGLRRGLEQQRIFEEEGVDLTRVIIGHSGDSTDVGYLEELISAGSYLGMDRFGLDVLLPFEERVQIVATMCERGHADKMVLSHDANCYFDALPEQLVPQMAPNWHYLHIHNDVIPALKHRGVTDEQIHTMLVENPRKIFDRQGAYQ

SEQ ID NO: 696 - protein, 326 aa, Artificial Sequence
  Synthetic
MSELNTARGTIDTADLGVTLMHEHVFIMTTEIALNYPEAWGDEEKRVADAVARLNELKSRGVDTIVDLTVIGLGRYIPRIARVAAQTELNIVVATGLYTYNDIPFRFHYEGPGGMLDGPEIMTDMFVRDIEQGIADTGIKAGILKCATDEPGITPGVERVLRAVAQAHKRTGVPISTRTHAGLRRGLEQQRIFEEEGVDLTRVIIGHSGDSTDVGYLEELISAGSYLGMDRFGLDVLLPFEERVQIVATMCERGHADKMVLSHDANCYFDALPEQLVPQMAPNWHYLHIHNDVIPALKHRGVTDEQIHTMLVENPRKIFDRQGAYQ

SEQ ID NO: 697 - protein, 326 aa, Artificial Sequence
  Synthetic
MSELNTARGTIDTADLGVTLMHEHVFIMTTEIALNYPEAWGDEEKRVADAVARLNELKSRGVDTIVDLTVIGLGRYIPRIARVAAQTELNIVVATGLYTYNDIPFRFHYEGPGGMLDGPEIMTDMFVRDIEQGIADTGIKAGILKCATDEPGITPGVERVLRAVAQAHKRTGVPISTSTHAGLRRGLEQQRIFEEEGVDLTRVIIGHSGDSTDVGYLEELISAGSYLGMDRFGLDVLLPFEERVQIVATMCERGHADKMVLSHDANCYFDALPEQLVPQMAPNWHYLHIHNDVIPALKHRGVTDEQIHTMLVENPRKIFDRQGAYQ

SEQ ID NO: 698 - protein, 326 aa, Artificial Sequence
  Synthetic
MSELNTARGTIDTADLGVTLMHEHVFIMTTEIALNYPEAWGDEEKRVADAVARLNELKSRGVDTIVDLTVIGLGRYIPRIARVAAQTELNIVVATGLYTYNDIPFRFHYEGPGGMLDGPEIMTDMFVRDIEQGIADTGIKAGILKCATDEPGITPGVERVLRAVAQAHKRTGVPISTTTHAGLRRGLEQQRIFEEEGVDLTRVIIGHSGDSTDVGYLEELISAGSYLGMDRFGLDVLLPFEERVQIVATMCERGHADKMVLSHDANCYFDALPEQLVPQMAPNWHYLHIHNDVIPALKHRGVTDEQIHTMLVENPRKIFDRQGAYQ

SEQ ID NO: 699 - protein, 326 aa, Artificial Sequence
  Synthetic
MSELNTARGTIDTADLGVTLMHEHVFIMTTEIALNYPEAWGDEEKRVADAVARLNELKSRGVDTIVDLTVIGLGRYIPRIARVAAQTELNIVVATGLYTYNDIPFRFHYEGPGGMLDGPEIMTDMFVRDIEQGIADTGIKAGILKCATDEPGITPGVERVLRAVAQAHKRTGVPISTVTHAGLRRGLEQQRIFEEEGVDLTRVIIGHSGDSTDVGYLEELISAGSYLGMDRFGLDVLLPFEERVQIVATMCERGHADKMVLSHDANCYFDALPEQLVPQMAPNWHYLHIHNDVIPALKHRGVTDEQIHTMLVENPRKIFDRQGAYQ

SEQ ID NO: 700 - protein, 326 aa, Artificial Sequence
  Synthetic
MSELNTARGTIDTADLGVTLMHEHVFIMTTEIALNYPEAWGDEEKRVADAVARLNELKSRGVDTIVDLTVIGLGRYIPRIARVAAQTELNIVVATGLYTYNDIPFRFHYEGPGGMLDGPEIMTDMFVRDIEQGIADTGIKAGILKCATDEPGITPGVERVLRAVAQAHKRTGVPISTYTHAGLRRGLEQQRIFEEEGVDLTRVIIGHSGDSTDVGYLEELISAGSYLGMDRFGLDVLLPFEERVQIVATMCERGHADKMVLSHDANCYFDALPEQLVPQMAPNWHYLHIHNDVIPALKHRGVTDEQIHTMLVENPRKIFDRQGAYQ

SEQ ID NO: 701 - protein, 326 aa, Artificial Sequence
  Synthetic
MSELNTARGTIDTADLGVTLMHEHVFIMTTEIALNYPEAWGDEEKRVADAVARLNELKSRGVDTIVDLTVIGLGRYIPRIARVAAQTELNIVVATGLYTYNDIPFRFHYEGPGGMLDGPEIMTDMFVRDIEQGIADTGIKAGILKCATDEPGITPGVERVLRAVAQAHKRTGVPISTHDHAGLRRGLEQQRIFEEEGVDLTRVIIGHSGDSTDVGYLEELISAGSYLGMDRFGLDVLLPFEERVQIVATMCERGHADKMVLSHDANCYFDALPEQLVPQMAPNWHYLHIHNDVIPALKHRGVTDEQIHTMLVENPRKIFDRQGAYQ

SEQ ID NO: 702 - protein, 326 aa, Artificial Sequence
  Synthetic
MSELNTARGTIDTADLGVTLMHEHVFIMTTEIALNYPEAWGDEEKRVADAVARLNELKSRGVDTIVDLTVIGLGRYIPRIARVAAQTELNIVVATGLYTYNDIPFRFHYEGPGGMLDGPEIMTDMFVRDIEQGIADTGIKAGILKCATDEPGITPGVERVLRAVAQAHKRTGVPISTHFHAGLRRGLEQQRIFEEEGVDLTRVIIGHSGDSTDVGYLEELISAGSYLGMDRFGLDVLLPFEERVQIVATMCERGHADKMVLSHDANCYFDALPEQLVPQMAPNWHYLHIHNDVIPALKHRGVTDEQIHTMLVENPRKIFDRQGAYQ

SEQ ID NO: 703 - protein, 326 aa, Artificial Sequence
  Synthetic
MSELNTARGTIDTADLGVTLMHEHVFIMTTEIALNYPEAWGDEEKRVADAVARLNELKSRGVDTIVDLTVIGLGRYIPRIARVAAQTELNIVVATGLYTYNDIPFRFHYEGPGGMLDGPEIMTDMFVRDIEQGIADTGIKAGILKCATDEPGITPGVERVLRAVAQAHKRTGVPISTHIHAGLRRGLEQQRIFEEEGVDLTRVIIGHSGDSTDVGYLEELISAGSYLGMDRFGLDVLLPFEERVQIVATMCERGHADKMVLSHDANCYFDALPEQLVPQMAPNWHYLHIHNDVIPALKHRGVTDEQIHTMLVENPRKIFDRQGAYQ

SEQ ID NO: 704 - protein, 326 aa, Artificial Sequence
  Synthetic
MSELNTARGTIDTADLGVTLMHEHVFIMTTEIALNYPEAWGDEEKRVADAVARLNELKSRGVDTIVDLTVIGLGRYIPRIARVAAQTELNIVVATGLYTYNDIPFRFHYEGPGGMLDGPEIMTDMFVRDIEQGIADTGIKAGILKCATDEPGITPGVERVLRAVAQAHKRTGVPISTHMHAGLRRGLEQQRIFEEEGVDLTRVIIGHSGDSTDVGYLEELISAGSYLGMDRFGLDVLLPFEERVQIVATMCERGHADKMVLSHDANCYFDALPEQLVPQMAPNWHYLHIHNDVIPALKHRGVTDEQIHTMLVENPRKIFDRQGAYQ

SEQ ID NO: 705 - protein, 326 aa, Artificial Sequence
  Synthetic
MSELNTARGTIDTADLGVTLMHEHVFIMTTEIALNYPEAWGDEEKRVADAVARLNELKSRGVDTIVDLTVIGLGRYIPRIARVAAQTELNIVVATGLYTYNDIPFRFHYEGPGGMLDGPEIMTDMFVRDIEQGIADTGIKAGILKCATDEPGITPGVERVLRAVAQAHKRTGVPISTHNHAGLRRGLEQQRIFEEEGVDLTRVIIGHSGDSTDVGYLEELISAGSYLGMDRFGLDVLLPFEERVQIVATMCERGHADKMVLSHDANCYFDALPEQLVPQMAPNWHYLHIHNDVIPALKHRGVTDEQIHTMLVENPRKIFDRQGAYQ

SEQ ID NO: 706 - protein, 326 aa, Artificial Sequence
  Synthetic
MSELNTARGTIDTADLGVTLMHEHVFIMTTEIALNYPEAWGDEEKRVADAVARLNELKSRGVDTIVDLTVIGLGRYIPRIARVAAQTELNIVVATGLYTYNDIPFRFHYEGPGGMLDGPEIMTDMFVRDIEQGIADTGIKAGILKCATDEPGITPGVERVLRAVAQAHKRTGVPISTHWHAGLRRGLEQQRIFEEEGVDLTRVIIGHSGDSTDVGYLEELISAGSYLGMDRFGLDVLLPFEERVQIVATMCERGHADKMVLSHDANCYFDALPEQLVPQMAPNWHYLHIHNDVIPALKHRGVTDEQIHTMLVENPRKIFDRQGAYQ

SEQ ID NO: 707 - protein, 326 aa, Artificial Sequence
  Synthetic
MSELNTARGTIDTADLGVTLMHEHVFIMTTEIALNYPEAWGDEEKRVADAVARLNELKSRGVDTIVDLTVIGLGRYIPRIARVAAQTELNIVVATGLYTYNDIPFRFHYEGPGGMLDGPEIMTDMFVRDIEQGIADTGIKAGILKCATDEPGITPGVERVLRAVAQAHKRTGVPISTHTHCGLRRGLEQQRIFEEEGVDLTRVIIGHSGDSTDVGYLEELISAGSYLGMDRFGLDVLLPFEERVQIVATMCERGHADKMVLSHDANCYFDALPEQLVPQMAPNWHYLHIHNDVIPALKHRGVTDEQIHTMLVENPRKIFDRQGAYQ

SEQ ID NO: 708 - protein, 326 aa, Artificial Sequence
  Synthetic
MSELNTARGTIDTADLGVTLMHEHVFIMTTEIALNYPEAWGDEEKRVADAVARLNELKSRGVDTIVDLTVIGLGRYIPRIARVAAQTELNIVVATGLYTYNDIPFRFHYEGPGGMLDGPEIMTDMFVRDIEQGIADTGIKAGILKCATDEPGITPGVERVLRAVAQAHKRTGVPISTHTHGGLRRGLEQQRIFEEEGVDLTRVIIGHSGDSTDVGYLEELISAGSYLGMDRFGLDVLLPFEERVQIVATMCERGHADKMVLSHDANCYFDALPEQLVPQMAPNWHYLHIHNDVIPALKHRGVTDEQIHTMLVENPRKIFDRQGAYQ

SEQ ID NO: 709 - protein, 326 aa, Artificial Sequence
  Synthetic
MSELNTARGTIDTADLGVTLMHEHVFIMTTEIALNYPEAWGDEEKRVADAVARLNELKSRGVDTIVDLTVIGLGRYIPRIARVAAQTELNIVVATGLYTYNDIPFRFHYEGPGGMLDGPEIMTDMFVRDIEQGIADTGIKAGILKCATDEPGITPGVERVLRAVAQAHKRTGVPISTHTHHGLRRGLEQQRIFEEEGVDLTRVIIGHSGDSTDVGYLEELISAGSYLGMDRFGLDVLLPFEERVQIVATMCERGHADKMVLSHDANCYFDALPEQLVPQMAPNWHYLHIHNDVIPALKHRGVTDEQIHTMLVENPRKIFDRQGAYQ

SEQ ID NO: 710 - protein, 326 aa, Artificial Sequence
  Synthetic
MSELNTARGTIDTADLGVTLMHEHVFIMTTEIALNYPEAWGDEEKRVADAVARLNELKSRGVDTIVDLTVIGLGRYIPRIARVAAQTELNIVVATGLYTYNDIPFRFHYEGPGGMLDGPEIMTDMFVRDIEQGIADTGIKAGILKCATDEPGITPGVERVLRAVAQAHKRTGVPISTHTHMGLRRGLEQQRIFEEEGVDLTRVIIGHSGDSTDVGYLEELISAGSYLGMDRFGLDVLLPFEERVQIVATMCERGHADKMVLSHDANCYFDALPEQLVPQMAPNWHYLHIHNDVIPALKHRGVTDEQIHTMLVENPRKIFDRQGAYQ

SEQ ID NO: 711 - protein, 326 aa, Artificial Sequence
  Synthetic
MSELNTARGTIDTADLGVTLMHEHVFIMTTEIALNYPEAWGDEEKRVADAVARLNELKSRGVDTIVDLTVIGLGRYIPRIARVAAQTELNIVVATGLYTYNDIPFRFHYEGPGGMLDGPEIMTDMFVRDIEQGIADTGIKAGILKCATDEPGITPGVERVLRAVAQAHKRTGVPISTHTHSGLRRGLEQQRIFEEEGVDLTRVIIGHSGDSTDVGYLEELISAGSYLGMDRFGLDVLLPFEERVQIVATMCERGHADKMVLSHDANCYFDALPEQLVPQMAPNWHYLHIHNDVIPALKHRGVTDEQIHTMLVENPRKIFDRQGAYQ

SEQ ID NO: 712 - protein, 326 aa, Artificial Sequence
  Synthetic
MSELNTARGTIDTADLGVTLMHEHVFIMTTEIALNYPEAWGDEEKRVADAVARLNELKSRGVDTIVDLTVIGLGRYIPRIARVAAQTELNIVVATGLYTYNDIPFRFHYEGPGGMLDGPEIMTDMFVRDIEQGIADTGIKAGILKCATDEPGITPGVERVLRAVAQAHKRTGVPISTHTHWGLRRGLEQQRIFEEEGVDLTRVIIGHSGDSTDVGYLEELISAGSYLGMDRFGLDVLLPFEERVQIVATMCERGHADKMVLSHDANCYFDALPEQLVPQMAPNWHYLHIHNDVIPALKHRGVTDEQIHTMLVENPRKIFDRQGAYQ

SEQ ID NO: 713 - protein, 326 aa, Artificial Sequence
  Synthetic
MSELNTARGTIDTADLGVTLMHEHVFIMTTEIALNYPEAWGDEEKRVADAVARLNELKSRGVDTIVDLTVIGLGRYIPRIARVAAQTELNIVVATGLYTYNDIPFRFHYEGPGGMLDGPEIMTDMFVRDIEQGIADTGIKAGILKCATDEPGITPGVERVLRAVAQAHKRTGVPISTHTHAGLRRGLEAQRIFEEEGVDLTRVIIGHSGDSTDVGYLEELISAGSYLGMDRFGLDVLLPFEERVQIVATMCERGHADKMVLSHDANCYFDALPEQLVPQMAPNWHYLHIHNDVIPALKHRGVTDEQIHTMLVENPRKIFDRQGAYQ

SEQ ID NO: 714 - protein, 326 aa, Artificial Sequence
  Synthetic
MSELNTARGTIDTADLGVTLMHEHVFIMTTEIALNYPEAWGDEEKRVADAVARLNELKSRGVDTIVDLTVIGLGRYIPRIARVAAQTELNIVVATGLYTYNDIPFRFHYEGPGGMLDGPEIMTDMFVRDIEQGIADTGIKAGILKCATDEPGITPGVERVLRAVAQAHKRTGVPISTHTHAGLRRGLECQRIFEEEGVDLTRVIIGHSGDSTDVGYLEELISAGSYLGMDRFGLDVLLPFEERVQIVATMCERGHADKMVLSHDANCYFDALPEQLVPQMAPNWHYLHIHNDVIPALKHRGVTDEQIHTMLVENPRKIFDRQGAYQ

SEQ ID NO: 715 - protein, 326 aa, Artificial Sequence
  Synthetic
MSELNTARGTIDTADLGVTLMHEHVFIMTTEIALNYPEAWGDEEKRVADAVARLNELKSRGVDTIVDLTVIGLGRYIPRIARVAAQTELNIVVATGLYTYNDIPFRFHYEGPGGMLDGPEIMTDMFVRDIEQGIADTGIKAGILKCATDEPGITPGVERVLRAVAQAHKRTGVPISTHTHAGLRRGLEEQRIFEEEGVDLTRVIIGHSGDSTDVGYLEELISAGSYLGMDRFGLDVLLPFEERVQIVATMCERGHADKMVLSHDANCYFDALPEQLVPQMAPNWHYLHIHNDVIPALKHRGVTDEQIHTMLVENPRKIFDRQGAYQ

SEQ ID NO: 716 - protein, 326 aa, Artificial Sequence
  Synthetic
MSELNTARGTIDTADLGVTLMHEHVFIMTTEIALNYPEAWGDEEKRVADAVARLNELKSRGVDTIVDLTVIGLGRYIPRIARVAAQTELNIVVATGLYTYNDIPFRFHYEGPGGMLDGPEIMTDMFVRDIEQGIADTGIKAGILKCATDEPGITPGVERVLRAVAQAHKRTGVPISTHTHAGLRRGLEIQRIFEEEGVDLTRVIIGHSGDSTDVGYLEELISAGSYLGMDRFGLDVLLPFEERVQIVATMCERGHADKMVLSHDANCYFDALPEQLVPQMAPNWHYLHIHNDVIPALKHRGVTDEQIHTMLVENPRKIFDRQGAYQ

SEQ ID NO: 717 - protein, 326 aa, Artificial Sequence
  Synthetic
MSELNTARGTIDTADLGVTLMHEHVFIMTTEIALNYPEAWGDEEKRVADAVARLNELKSRGVDTIVDLTVIGLGRYIPRIARVAAQTELNIVVATGLYTYNDIPFRFHYEGPGGMLDGPEIMTDMFVRDIEQGIADTGIKAGILKCATDEPGITPGVERVLRAVAQAHKRTGVPISTHTHAGLRRGLELQRIFEEEGVDLTRVIIGHSGDSTDVGYLEELISAGSYLGMDRFGLDVLLPFEERVQIVATMCERGHADKMVLSHDANCYFDALPEQLVPQMAPNWHYLHIHNDVIPALKHRGVTDEQIHTMLVENPRKIFDRQGAYQ

SEQ ID NO: 718 - protein, 326 aa, Artificial Sequence
  Synthetic
MSELNTARGTIDTADLGVTLMHEHVFIMTTEIALNYPEAWGDEEKRVADAVARLNELKSRGVDTIVDLTVIGLGRYIPRIARVAAQTELNIVVATGLYTYNDIPFRFHYEGPGGMLDGPEIMTDMFVRDIEQGIADTGIKAGILKCATDEPGITPGVERVLRAVAQAHKRTGVPISTHTHAGLRRGLEMQRIFEEEGVDLTRVIIGHSGDSTDVGYLEELISAGSYLGMDRFGLDVLLPFEERVQIVATMCERGHADKMVLSHDANCYFDALPEQLVPQMAPNWHYLHIHNDVIPALKHRGVTDEQIHTMLVENPRKIFDRQGAYQ

SEQ ID NO: 719 - protein, 326 aa, Artificial Sequence
  Synthetic
MSELNTARGTIDTADLGVTLMHEHVFIMTTEIALNYPEAWGDEEKRVADAVARLNELKSRGVDTIVDLTVIGLGRYIPRIARVAAQTELNIVVATGLYTYNDIPFRFHYEGPGGMLDGPEIMTDMFVRDIEQGIADTGIKAGILKCATDEPGITPGVERVLRAVAQAHKRTGVPISTHTHAGLRRGLEVQRIFEEEGVDLTRVIIGHSGDSTDVGYLEELISAGSYLGMDRFGLDVLLPFEERVQIVATMCERGHADKMVLSHDANCYFDALPEQLVPQMAPNWHYLHIHNDVIPALKHRGVTDEQIHTMLVENPRKIFDRQGAYQ

SEQ ID NO: 720 - protein, 326 aa, Artificial Sequence
  Synthetic
MSELNTARGTIDTADLGVTLMHEHVFIMTTEIALNYPEAWGDEEKRVADAVARLNELKSRGVDTIVDLTVIGLGRYIPRIARVAAQTELNIVVATGLYTYNDIPFRFHYEGPGGMLDGPEIMTDMFVRDIEQGIADTGIKAGILKCATDEPGITPGVERVLRAVAQAHKRTGVPISTHTHAGLRRGLEQQRIFEEEGVDLTRVVIGHSGDSTDVGYLEELISAGSYLGMDRFGLDVLLPFEERVQIVATMCERGHADKMVLSHDANCYFDALPEQLVPQMAPNWHYLHIHNDVIPALKHRGVTDEQIHTMLVENPRKIFDRQGAYQ

SEQ ID NO: 721 - protein, 326 aa, Artificial Sequence
  Synthetic
MSELNTARGTIDTADLGVTLMHEHVFIMTTEIALNYPEAWGDEEKRVADAVARLNELKSRGVDTIVDLTVIGLGRYIPRIARVAAQTELNIVVATGLYTYNDIPFRFHYEGPGGMLDGPEIMTDMFVRDIEQGIADTGIKAGILKCATDEPGITPGVERVLRAVAQAHKRTGVPISTHTHAGLRRGLEQQRIFEEEGVDLTRVIINHSGDSTDVGYLEELISAGSYLGMDRFGLDVLLPFEERVQIVATMCERGHADKMVLSHDANCYFDALPEQLVPQMAPNWHYLHIHNDVIPALKHRGVTDEQIHTMLVENPRKIFDRQGAYQ

SEQ ID NO: 722 - protein, 326 aa, Artificial Sequence
  Synthetic
MSELNTARGTIDTADLGVTLMHEHVFIMTTEIALNYPEAWGDEEKRVADAVARLNELKSRGVDTIVDLTVIGLGRYIPRIARVAAQTELNIVVATGLYTYNDIPFRFHYEGPGGMLDGPEIMTDMFVRDIEQGIADTGIKAGILKCATDEPGITPGVERVLRAVAQAHKRTGVPISTHTHAGLRRGLEQQRIFEEEGVDLTRVIISHSGDSTDVGYLEELISAGSYLGMDRFGLDVLLPFEERVQIVATMCERGHADKMVLSHDANCYFDALPEQLVPQMAPNWHYLHIHNDVIPALKHRGVTDEQIHTMLVENPRKIFDRQGAYQ

SEQ ID NO: 723 - protein, 326 aa, Artificial Sequence
  Synthetic
MSELNTARGTIDTADLGVTLMHEHVFIMTTEIALNYPEAWGDEEKRVADAVARLNELKSRGVDTIVDLTVIGLGRYIPRIARVAAQTELNIVVATGLYTYNDIPFRFHYEGPGGMLDGPEIMTDMFVRDIEQGIADTGIKAGILKCATDEPGITPGVERVLRAVAQAHKRTGVPISTHTHAGLRRGLEQQRIFEEEGVDLTRVIIGNSGDSTDVGYLEELISAGSYLGMDRFGLDVLLPFEERVQIVATMCERGHADKMVLSHDANCYFDALPEQLVPQMAPNWHYLHIHNDVIPALKHRGVTDEQIHTMLVENPRKIFDRQGAYQ

SEQ ID NO: 724 - protein, 326 aa, Artificial Sequence
  Synthetic
MSELNTARGTIDTADLGVTLMHEHVFIMTTEIALNYPEAWGDEEKRVADAVARLNELKSRGVDTIVDLTVIGLGRYIPRIARVAAQTELNIVVATGLYTYNDIPFRFHYEGPGGMLDGPEIMTDMFVRDIEQGIADTGIKAGILKCATDEPGITPGVERVLRAVAQAHKRTGVPISTHTHAGLRRGLEQQRIFEEEGVDLTRVIIGHAGDSTDVGYLEELISAGSYLGMDRFGLDVLLPFEERVQIVATMCERGHADKMVLSHDANCYFDALPEQLVPQMAPNWHYLHIHNDVIPALKHRGVTDEQIHTMLVENPRKIFDRQGAYQ

SEQ ID NO: 725 - protein, 326 aa, Artificial Sequence
  Synthetic
MSELNTARGTIDTADLGVTLMHEHVFIMTTEIALNYPEAWGDEEKRVADAVARLNELKSRGVDTIVDLTVIGLGRYIPRIARVAAQTELNIVVATGLYTYNDIPFRFHYEGPGGMLDGPEIMTDMFVRDIEQGIADTGIKAGILKCATDEPGITPGVERVLRAVAQAHKRTGVPISTHTHAGLRRGLEQQRIFEEEGVDLTRVIIGHCGDSTDVGYLEELISAGSYLGMDRFGLDVLLPFEERVQIVATMCERGHADKMVLSHDANCYFDALPEQLVPQMAPNWHYLHIHNDVIPALKHRGVTDEQIHTMLVENPRKIFDRQGAYQ

SEQ ID NO: 726 - protein, 326 aa, Artificial Sequence
  Synthetic
MSELNTARGTIDTADLGVTLMHEHVFIMTTEIALNYPEAWGDEEKRVADAVARLNELKSRGVDTIVDLTVIGLGRYIPRIARVAAQTELNIVVATGLYTYNDIPFRFHYEGPGGMLDGPEIMTDMFVRDIEQGIADTGIKAGILKCATDEPGITPGVERVLRAVAQAHKRTGVPISTHTHAGLRRGLEQQRIFEEEGVDLTRVIIGHMGDSTDVGYLEELISAGSYLGMDRFGLDVLLPFEERVQIVATMCERGHADKMVLSHDANCYFDALPEQLVPQMAPNWHYLHIHNDVIPALKHRGVTDEQIHTMLVENPRKIFDRQGAYQ

SEQ ID NO: 727 - protein, 326 aa, Artificial Sequence
  Synthetic
MSELNTARGTIDTADLGVTLMHEHVFIMTTEIALNYPEAWGDEEKRVADAVARLNELKSRGVDTIVDLTVIGLGRYIPRIARVAAQTELNIVVATGLYTYNDIPFRFHYEGPGGMLDGPEIMTDMFVRDIEQGIADTGIKAGILKCATDEPGITPGVERVLRAVAQAHKRTGVPISTHTHAGLRRGLEQQRIFEEEGVDLTRVIIGHTGDSTDVGYLEELISAGSYLGMDRFGLDVLLPFEERVQIVATMCERGHADKMVLSHDANCYFDALPEQLVPQMAPNWHYLHIHNDVIPALKHRGVTDEQIHTMLVENPRKIFDRQGAYQ

SEQ ID NO: 728 - protein, 326 aa, Artificial Sequence
  Synthetic
MSELNTARGTIDTADLGVTLMHEHVFIMTTEIALNYPEAWGDEEKRVADAVARLNELKSRGVDTIVDLTVIGLGRYIPRIARVAAQTELNIVVATGLYTYNDIPFRFHYEGPGGMLDGPEIMTDMFVRDIEQGIADTGIKAGILKCATDEPGITPGVERVLRAVAQAHKRTGVPISTHTHAGLRRGLEQQRIFEEEGVDLTRVIIGHSCDSTDVGYLEELISAGSYLGMDRFGLDVLLPFEERVQIVATMCERGHADKMVLSHDANCYFDALPEQLVPQMAPNWHYLHIHNDVIPALKHRGVTDEQIHTMLVENPRKIFDRQGAYQ

SEQ ID NO: 729 - protein, 326 aa, Artificial Sequence
  Synthetic
MSELNTARGTIDTADLGVTLMHEHVFIMTTEIALNYPEAWGDEEKRVADAVARLNELKSRGVDTIVDLTVIGLGRYIPRIARVAAQTELNIVVATGLYTYNDIPFRFHYEGPGGMLDGPEIMTDMFVRDIEQGIADTGIKAGILKCATDEPGITPGVERVLRAVAQAHKRTGVPISTHTHAGLRRGLEQQRIFEEEGVDLTRVIIGHSNDSTDVGYLEELISAGSYLGMDRFGLDVLLPFEERVQIVATMCERGHADKMVLSHDANCYFDALPEQLVPQMAPNWHYLHIHNDVIPALKHRGVTDEQIHTMLVENPRKIFDRQGAYQ

SEQ ID NO: 730 - protein, 326 aa, Artificial Sequence
  Synthetic
MSELNTARGTIDTADLGVTLMHEHVFIMTTEIALNYPEAWGDEEKRVADAVARLNELKSRGVDTIVDLTVIGLGRYIPRIARVAAQTELNIVVATGLYTYNDIPFRFHYEGPGGMLDGPEIMTDMFVRDIEQGIADTGIKAGILKCATDEPGITPGVERVLRAVAQAHKRTGVPISTHTHAGLRRGLEQQRIFEEEGVDLTRVIIGHSGCSTDVGYLEELISAGSYLGMDRFGLDVLLPFEERVQIVATMCERGHADKMVLSHDANCYFDALPEQLVPQMAPNWHYLHIHNDVIPALKHRGVTDEQIHTMLVENPRKIFDRQGAYQ

SEQ ID NO: 731 - protein, 326 aa, Artificial Sequence
  Synthetic
MSELNTARGTIDTADLGVTLMHEHVFIMTTEIALNYPEAWGDEEKRVADAVARLNELKSRGVDTIVDLTVIGLGRYIPRIARVAAQTELNIVVATGLYTYNDIPFRFHYEGPGGMLDGPEIMTDMFVRDIEQGIADTGIKAGILKCATDEPGITPGVERVLRAVAQAHKRTGVPISTHTHAGLRRGLEQQRIFEEEGVDLTRVIIGHSGESTDVGYLEELISAGSYLGMDRFGLDVLLPFEERVQIVATMCERGHADKMVLSHDANCYFDALPEQLVPQMAPNWHYLHIHNDVIPALKHRGVTDEQIHTMLVENPRKIFDRQGAYQ

SEQ ID NO: 732 - protein, 326 aa, Artificial Sequence
  Synthetic
MSELNTARGTIDTADLGVTLMHEHVFIMTTEIALNYPEAWGDEEKRVADAVARLNELKSRGVDTIVDLTVIGLGRYIPRIARVAAQTELNIVVATGLYTYNDIPFRFHYEGPGGMLDGPEIMTDMFVRDIEQGIADTGIKAGILKCATDEPGITPGVERVLRAVAQAHKRTGVPISTHTHAGLRRGLEQQRIFEEEGVDLTRVIIGHSGMSTDVGYLEELISAGSYLGMDRFGLDVLLPFEERVQIVATMCERGHADKMVLSHDANCYFDALPEQLVPQMAPNWHYLHIHNDVIPALKHRGVTDEQIHTMLVENPRKIFDRQGAYQ

SEQ ID NO: 733 - protein, 326 aa, Artificial Sequence
  Synthetic
MSELNTARGTIDTADLGVTLMHEHVFIMTTEIALNYPEAWGDEEKRVADAVARLNELKSRGVDTIVDLTVIGLGRYIPRIARVAAQTELNIVVATGLYTYNDIPFRFHYEGPGGMLDGPEIMTDMFVRDIEQGIADTGIKAGILKCATDEPGITPGVERVLRAVAQAHKRTGVPISTHTHAGLRRGLEQQRIFEEEGVDLTRVIIGHSGWSTDVGYLEELISAGSYLGMDRFGLDVLLPFEERVQIVATMCERGHADKMVLSHDANCYFDALPEQLVPQMAPNWHYLHIHNDVIPALKHRGVTDEQIHTMLVENPRKIFDRQGAYQ

SEQ ID NO: 734 - protein, 326 aa, Artificial Sequence
  Synthetic
MSELNTARGTIDTADLGVTLMHEHVFIMTTEIALNYPEAWGDEEKRVADAVARLNELKSRGVDTIVDLTVIGLGRYIPRIARVAAQTELNIVVATGLYTYNDIPFRFHYEGPGGMLDGPEIMTDMFVRDIEQGIADTGIKAGILKCATDEPGITPGVERVLRAVAQAHKRTGVPISTHTHAGLRRGLEQQRIFEEEGVDLTRVIIGHSGDSTDVGYLEELISAGSYLAMDRFGLDVLLPFEERVQIVATMCERGHADKMVLSHDANCYFDALPEQLVPQMAPNWHYLHIHNDVIPALKHRGVTDEQIHTMLVENPRKIFDRQGAYQ

SEQ ID NO: 735 - protein, 326 aa, Artificial Sequence
  Synthetic
MSELNTARGTIDTADLGVTLMHEHVFIMTTEIALNYPEAWGDEEKRVADAVARLNELKSRGVDTIVDLTVIGLGRYIPRIARVAAQTELNIVVATGLYTYNDIPFRFHYEGPGGMLDGPEIMTDMFVRDIEQGIADTGIKAGILKCATDEPGITPGVERVLRAVAQAHKRTGVPISTHTHAGLRRGLEQQRIFEEEGVDLTRVIIGHSGDSTDVGYLEELISAGSYLCMDRFGLDVLLPFEERVQIVATMCERGHADKMVLSHDANCYFDALPEQLVPQMAPNWHYLHIHNDVIPALKHRGVTDEQIHTMLVENPRKIFDRQGAYQ

SEQ ID NO: 736 - protein, 326 aa, Artificial Sequence
  Synthetic
MSELNTARGTIDTADLGVTLMHEHVFIMTTEIALNYPEAWGDEEKRVADAVARLNELKSRGVDTIVDLTVIGLGRYIPRIARVAAQTELNIVVATGLYTYNDIPFRFHYEGPGGMLDGPEIMTDMFVRDIEQGIADTGIKAGILKCATDEPGITPGVERVLRAVAQAHKRTGVPISTHTHAGLRRGLEQQRIFEEEGVDLTRVIIGHSGDSTDVGYLEELISAGSYLQMDRFGLDVLLPFEERVQIVATMCERGHADKMVLSHDANCYFDALPEQLVPQMAPNWHYLHIHNDVIPALKHRGVTDEQIHTMLVENPRKIFDRQGAYQ

SEQ ID NO: 737 - protein, 326 aa, Artificial Sequence
  Synthetic
MSELNTARGTIDTADLGVTLMHEHVFIMTTEIALNYPEAWGDEEKRVADAVARLNELKSRGVDTIVDLTVIGLGRYIPRIARVAAQTELNIVVATGLYTYNDIPFRFHYEGPGGMLDGPEIMTDMFVRDIEQGIADTGIKAGILKCATDEPGITPGVERVLRAVAQAHKRTGVPISTHTHAGLRRGLEQQRIFEEEGVDLTRVIIGHSGDSTDVGYLEELISAGSYLSMDRFGLDVLLPFEERVQIVATMCERGHADKMVLSHDANCYFDALPEQLVPQMAPNWHYLHIHNDVIPALKHRGVTDEQIHTMLVENPRKIFDRQGAYQ

SEQ ID NO: 738 - protein, 326 aa, Artificial Sequence
  Synthetic
MSELNTARGTIDTADLGVTLMHEHVFIMTTEIALNYPEAWGDEEKRVADAVARLNELKSRGVDTIVDLTVIGLGRYIPRIARVAAQTELNIVVATGLYTYNDIPFRFHYEGPGGMLDGPEIMTDMFVRDIEQGIADTGIKAGILKCATDEPGITPGVERVLRAVAQAHKRTGVPISTHTHAGLRRGLEQQRIFEEEGVDLTRVIIGHSGDSTDVGYLEELISAGSYLGMSRFGLDVLLPFEERVQIVATMCERGHADKMVLSHDANCYFDALPEQLVPQMAPNWHYLHIHNDVIPALKHRGVTDEQIHTMLVENPRKIFDRQGAYQ

SEQ ID NO: 739 - protein, 326 aa, Artificial Sequence
  Synthetic
MSELNTARGTIDTADLGVTLMHEHVFIMTTEIALNYPEAWGDEEKRVADAVARLNELKSRGVDTIVDLTVIGLGRYIPRIARVAAQTELNIVVATGLYTYNDIPFRFHYEGPGGMLDGPEIMTDMFVRDIEQGIADTGIKAGILKCATDEPGITPGVERVLRAVAQAHKRTGVPISTHTHAGLRRGLEQQRIFEEEGVDLTRVIIGHSGDSTDVGYLEELISAGSYLGMDCFGLDVLLPFEERVQIVATMCERGHADKMVLSHDANCYFDALPEQLVPQMAPNWHYLHIHNDVIPALKHRGVTDEQIHTMLVENPRKIFDRQGAYQ

SEQ ID NO: 740 - protein, 326 aa, Artificial Sequence
  Synthetic
MSELNTARGTIDTADLGVTLMHEHVFIMTTEIALNYPEAWGDEEKRVADAVARLNELKSRGVDTIVDLTVIGLGRYIPRIARVAAQTELNIVVATGLYTYNDIPFRFHYEGPGGMLDGPEIMTDMFVRDIEQGIADTGIKAGILKCATDEPGITPGVERVLRAVAQAHKRTGVPISTHTHAGLRRGLEQQRIFEEEGVDLTRVIIGHSGDSTDVGYLEELISAGSYLGMDFFGLDVLLPFEERVQIVATMCERGHADKMVLSHDANCYFDALPEQLVPQMAPNWHYLHIHNDVIPALKHRGVTDEQIHTMLVENPRKIFDRQGAYQ

SEQ ID NO: 741 - protein, 326 aa, Artificial Sequence
  Synthetic
MSELNTARGTIDTADLGVTLMHEHVFIMTTEIALNYPEAWGDEEKRVADAVARLNELKSRGVDTIVDLTVIGLGRYIPRIARVAAQTELNIVVATGLYTYNDIPFRFHYEGPGGMLDGPEIMTDMFVRDIEQGIADTGIKAGILKCATDEPGITPGVERVLRAVAQAHKRTGVPISTHTHAGLRRGLEQQRIFEEEGVDLTRVIIGHSGDSTDVGYLEELISAGSYLGMDGFGLDVLLPFEERVQIVATMCERGHADKMVLSHDANCYFDALPEQLVPQMAPNWHYLHIHNDVIPALKHRGVTDEQIHTMLVENPRKIFDRQGAYQ

SEQ ID NO: 742 - protein, 326 aa, Artificial Sequence
  Synthetic
MSELNTARGTIDTADLGVTLMHEHVFIMTTEIALNYPEAWGDEEKRVADAVARLNELKSRGVDTIVDLTVIGLGRYIPRIARVAAQTELNIVVATGLYTYNDIPFRFHYEGPGGMLDGPEIMTDMFVRDIEQGIADTGIKAGILKCATDEPGITPGVERVLRAVAQAHKRTGVPISTHTHAGLRRGLEQQRIFEEEGVDLTRVIIGHSGDSTDVGYLEELISAGSYLGMDHFGLDVLLPFEERVQIVATMCERGHADKMVLSHDANCYFDALPEQLVPQMAPNWHYLHIHNDVIPALKHRGVTDEQIHTMLVENPRKIFDRQGAYQ

SEQ ID NO: 743 - protein, 326 aa, Artificial Sequence
  Synthetic
MSELNTARGTIDTADLGVTLMHEHVFIMTTEIALNYPEAWGDEEKRVADAVARLNELKSRGVDTIVDLTVIGLGRYIPRIARVAAQTELNIVVATGLYTYNDIPFRFHYEGPGGMLDGPEIMTDMFVRDIEQGIADTGIKAGILKCATDEPGITPGVERVLRAVAQAHKRTGVPISTHTHAGLRRGLEQQRIFEEEGVDLTRVIIGHSGDSTDVGYLEELISAGSYLGMDMFGLDVLLPFEERVQIVATMCERGHADKMVLSHDANCYFDALPEQLVPQMAPNWHYLHIHNDVIPALKHRGVTDEQIHTMLVENPRKIFDRQGAYQ

SEQ ID NO: 744 - protein, 326 aa, Artificial Sequence
  Synthetic
MSELNTARGTIDTADLGVTLMHEHVFIMTTEIALNYPEAWGDEEKRVADAVARLNELKSRGVDTIVDLTVIGLGRYIPRIARVAAQTELNIVVATGLYTYNDIPFRFHYEGPGGMLDGPEIMTDMFVRDIEQGIADTGIKAGILKCATDEPGITPGVERVLRAVAQAHKRTGVPISTHTHAGLRRGLEQQRIFEEEGVDLTRVIIGHSGDSTDVGYLEELISAGSYLGMDNFGLDVLLPFEERVQIVATMCERGHADKMVLSHDANCYFDALPEQLVPQMAPNWHYLHIHNDVIPALKHRGVTDEQIHTMLVENPRKIFDRQGAYQ

SEQ ID NO: 745 - protein, 326 aa, Artificial Sequence
  Synthetic
MSELNTARGTIDTADLGVTLMHEHVFIMTTEIALNYPEAWGDEEKRVADAVARLNELKSRGVDTIVDLTVIGLGRYIPRIARVAAQTELNIVVATGLYTYNDIPFRFHYEGPGGMLDGPEIMTDMFVRDIEQGIADTGIKAGILKCATDEPGITPGVERVLRAVAQAHKRTGVPISTHTHAGLRRGLEQQRIFEEEGVDLTRVIIGHSGDSTDVGYLEELISAGSYLGMDQFGLDVLLPFEERVQIVATMCERGHADKMVLSHDANCYFDALPEQLVPQMAPNWHYLHIHNDVIPALKHRGVTDEQIHTMLVENPRKIFDRQGAYQ

SEQ ID NO: 746 - protein, 326 aa, Artificial Sequence
  Synthetic
MSELNTARGTIDTADLGVTLMHEHVFIMTTEIALNYPEAWGDEEKRVADAVARLNELKSRGVDTIVDLTVIGLGRYIPRIARVAAQTELNIVVATGLYTYNDIPFRFHYEGPGGMLDGPEIMTDMFVRDIEQGIADTGIKAGILKCATDEPGITPGVERVLRAVAQAHKRTGVPISTHTHAGLRRGLEQQRIFEEEGVDLTRVIIGHSGDSTDVGYLEELISAGSYLGMDTFGLDVLLPFEERVQIVATMCERGHADKMVLSHDANCYFDALPEQLVPQMAPNWHYLHIHNDVIPALKHRGVTDEQIHTMLVENPRKIFDRQGAYQ

SEQ ID NO: 747 - protein, 326 aa, Artificial Sequence
  Synthetic
MSELNTARGTIDTADLGVTLMHEHVFIMTTEIALNYPEAWGDEEKRVADAVARLNELKSRGVDTIVDLTVIGLGRYIPRIARVAAQTELNIVVATGLYTYNDIPFRFHYEGPGGMLDGPEIMTDMFVRDIEQGIADTGIKAGILKCATDEPGITPGVERVLRAVAQAHKRTGVPISTHTHAGLRRGLEQQRIFEEEGVDLTRVIIGHSGDSTDVGYLEELISAGSYLGMDWFGLDVLLPFEERVQIVATMCERGHADKMVLSHDANCYFDALPEQLVPQMAPNWHYLHIHNDVIPALKHRGVTDEQIHTMLVENPRKIFDRQGAYQ

SEQ ID NO: 748 - protein, 326 aa, Artificial Sequence
  Synthetic
MSELNTARGTIDTADLGVTLMHEHVFIMTTEIALNYPEAWGDEEKRVADAVARLNELKSRGVDTIVDLTVIGLGRYIPRIARVAAQTELNIVVATGLYTYNDIPFRFHYEGPGGMLDGPEIMTDMFVRDIEQGIADTGIKAGILKCATDEPGITPGVERVLRAVAQAHKRTGVPISTHTHAGLRRGLEQQRIFEEEGVDLTRVIIGHSGDSTDVGYLEELISAGSYLGMDRFGLDVLLPFEERVQIVATMCERGHADKMILSHDANCYFDALPEQLVPQMAPNWHYLHIHNDVIPALKHRGVTDEQIHTMLVENPRKIFDRQGAYQ

SEQ ID NO: 749 - protein, 326 aa, Artificial Sequence
  Synthetic
MSELNTARGTIDTADLGVTLMHEHVFIMTTEIALNYPEAWGDEEKRVADAVARLNELKSRGVDTIVDLTVIGLGRYIPRIARVAAQTELNIVVATGLYTYNDIPFRFHYEGPGGMLDGPEIMTDMFVRDIEQGIADTGIKAGILKCATDEPGITPGVERVLRAVAQAHKRTGVPISTHTHAGLRRGLEQQRIFEEEGVDLTRVIIGHSGDSTDVGYLEELISAGSYLGMDRFGLDVLLPFEERVQIVATMCERGHADKMVLCHDANCYFDALPEQLVPQMAPNWHYLHIHNDVIPALKHRGVTDEQIHTMLVENPRKIFDRQGAYQ

SEQ ID NO: 750 - protein, 326 aa, Artificial Sequence
  Synthetic
MSELNTARGTIDTADLGVTLMHEHVFIMTTEIALNYPEAWGDEEKRVADAVARLNELKSRGVDTIVDLTVIGLGRYIPRIARVAAQTELNIVVATGLYTYNDIPFRFHYEGPGGMLDGPEIMTDMFVRDIEQGIADTGIKAGILKCATDEPGITPGVERVLRAVAQAHKRTGVPISTHTHAGLRRGLEQQRIFEEEGVDLTRVIIGHSGDSTDVGYLEELISAGSYLGMDRFGLDVLLPFEERVQIVATMCERGHADKMVLGHDANCYFDALPEQLVPQMAPNWHYLHIHNDVIPALKHRGVTDEQIHTMLVENPRKIFDRQGAYQ

SEQ ID NO: 751 - protein, 326 aa, Artificial Sequence
  Synthetic
MSELNTARGTIDTADLGVTLMHEHVFIMTTEIALNYPEAWGDEEKRVADAVARLNELKSRGVDTIVDLTVIGLGRYIPRIARVAAQTELNIVVATGLYTYNDIPFRFHYEGPGGMLDGPEIMTDMFVRDIEQGIADTGIKAGILKCATDEPGITPGVERVLRAVAQAHKRTGVPISTHTHAGLRRGLEQQRIFEEEGVDLTRVIIGHSGDSTDVGYLEELISAGSYLGMDRFGLDVLLPFEERVQIVATMCERGHADKMVLSCDANCYFDALPEQLVPQMAPNWHYLHIHNDVIPALKHRGVTDEQIHTMLVENPRKIFDRQGAYQ

SEQ ID NO: 752 - protein, 326 aa, Artificial Sequence
  Synthetic
MSELNTARGTIDTADLGVTLMHEHVFIMTTEIALNYPEAWGDEEKRVADAVARLNELKSRGVDTIVDLTVIGLGRYIPRIARVAAQTELNIVVATGLYTYNDIPFRFHYEGPGGMLDGPEIMTDMFVRDIEQGIADTGIKAGILKCATDEPGITPGVERVLRAVAQAHKRTGVPISTHTHAGLRRGLEQQRIFEEEGVDLTRVIIGHSGDSTDVGYLEELISAGSYLGMDRFGLDVLLPFEERVQIVATMCERGHADKMVLSFDANCYFDALPEQLVPQMAPNWHYLHIHNDVIPALKHRGVTDEQIHTMLVENPRKIFDRQGAYQ

SEQ ID NO: 753 - protein, 326 aa, Artificial Sequence
  Synthetic
MSELNTARGTIDTADLGVTLMHEHVFIMTTEIALNYPEAWGDEEKRVADAVARLNELKSRGVDTIVDLTVIGLGRYIPRIARVAAQTELNIVVATGLYTYNDIPFRFHYEGPGGMLDGPEIMTDMFVRDIEQGIADTGIKAGILKCATDEPGITPGVERVLRAVAQAHKRTGVPISTHTHAGLRRGLEQQRIFEEEGVDLTRVIIGHSGDSTDVGYLEELISAGSYLGMDRFGLDVLLPFEERVQIVATMCERGHADKMVLSNDANCYFDALPEQLVPQMAPNWHYLHIHNDVIPALKHRGVTDEQIHTMLVENPRKIFDRQGAYQ

SEQ ID NO: 754 - protein, 326 aa, Artificial Sequence
  Synthetic
MSELNTARGTIDTADLGVTLMHEHVFIMTTEIALNYPEAWGDEEKRVADAVARLNELKSRGVDTIVDLTVIGLGRYIPRIARVAAQTELNIVVATGLYTYNDIPFRFHYEGPGGMLDGPEIMTDMFVRDIEQGIADTGIKAGILKCATDEPGITPGVERVLRAVAQAHKRTGVPISTHTHAGLRRGLEQQRIFEEEGVDLTRVIIGHSGDSTDVGYLEELISAGSYLGMDRFGLDVLLPFEERVQIVATMCERGHADKMVLSSDANCYFDALPEQLVPQMAPNWHYLHIHNDVIPALKHRGVTDEQIHTMLVENPRKIFDRQGAYQ

SEQ ID NO: 755 - protein, 326 aa, Artificial Sequence
  Synthetic
MSELNTARGTIDTADLGVTLMHEHVFIMTTEIALNYPEAWGDEEKRVADAVARLNELKSRGVDTIVDLTVIGLGRYIPRIARVAAQTELNIVVATGLYTYNDIPFRFHYEGPGGMLDGPEIMTDMFVRDIEQGIADTGIKAGILKCATDEPGITPGVERVLRAVAQAHKRTGVPISTHTHAGLRRGLEQQRIFEEEGVDLTRVIIGHSGDSTDVGYLEELISAGSYLGMDRFGLDVLLPFEERVQIVATMCERGHADKMVLSTDANCYFDALPEQLVPQMAPNWHYLHIHNDVIPALKHRGVTDEQIHTMLVENPRKIFDRQGAYQ

SEQ ID NO: 756 - protein, 326 aa, Artificial Sequence
  Synthetic
MSELNTARGTIDTADLGVTLMHEHVFIMTTEIALNYPEAWGDEEKRVADAVARLNELKSRGVDTIVDLTVIGLGRYIPRIARVAAQTELNIVVATGLYTYNDIPFRFHYEGPGGMLDGPEIMTDMFVRDIEQGIADTGIKAGILKCATDEPGITPGVERVLRAVAQAHKRTGVPISTHTHAGLRRGLEQQRIFEEEGVDLTRVIIGHSGDSTDVGYLEELISAGSYLGMDRFGLDVLLPFEERVQIVATMCERGHADKMVLSYDANCYFDALPEQLVPQMAPNWHYLHIHNDVIPALKHRGVTDEQIHTMLVENPRKIFDRQGAYQ

SEQ ID NO: 757 - protein, 326 aa, Artificial Sequence
  Synthetic
MSELNTARGTIDTADLGVTLMHEHVFIMTTEIALNYPEAWGDEEKRVADAVARLNELKSRGVDTIVDLTVIGLGRYIPRIARVAAQTELNIVVATGLYTYNDIPFRFHYEGPGGMLDGPEIMTDMFVRDIEQGIADTGIKAGILKCATDEPGITPGVERVLRAVAQAHKRTGVPISTHTHAGLRRGLEQQRIFEEEGVDLTRVIIGHSGDSTDVGYLEELISAGSYLGMDRFGLDVLLPFEERVQIVATMCERGHADKMVLSHFANCYFDALPEQLVPQMAPNWHYLHIHNDVIPALKHRGVTDEQIHTMLVENPRKIFDRQGAYQ

SEQ ID NO: 758 - protein, 326 aa, Artificial Sequence
  Synthetic
MSELNTARGTIDTADLGVTLMHEHVFIMTTEIALNYPEAWGDEEKRVADAVARLNELKSRGVDTIVDLTVIGLGRYIPRIARVAAQTELNIVVATGLYTYNDIPFRFHYEGPGGMLDGPEIMTDMFVRDIEQGIADTGIKAGILKCATDEPGITPGVERVLRAVAQAHKRTGVPISTHTHAGLRRGLEQQRIFEEEGVDLTRVIIGHSGDSTDVGYLEELISAGSYLGMDRFGLDVLLPFEERVQIVATMCERGHADKMVLSHNANCYFDALPEQLVPQMAPNWHYLHIHNDVIPALKHRGVTDEQIHTMLVENPRKIFDRQGAYQ

SEQ ID NO: 759 - protein, 326 aa, Artificial Sequence
  Synthetic
MSELNTARGTIDTADLGVTLMHEHVFIMTTEIALNYPEAWGDEEKRVADAVARLNELKSRGVDTIVDLTVIGLGRYIPRIARVAAQTELNIVVATGLYTYNDIPFRFHYEGPGGMLDGPEIMTDMFVRDIEQGIADTGIKAGILKCATDEPGITPGVERVLRAVAQAHKRTGVPISTHTHAGLRRGLEQQRIFEEEGVDLTRVIIGHSGDSTDVGYLEELISAGSYLGMDRFGLDVLLPFEERVQIVATMCERGHADKMVLSHDCNCYFDALPEQLVPQMAPNWHYLHIHNDVIPALKHRGVTDEQIHTMLVENPRKIFDRQGAYQ

SEQ ID NO: 760 - protein, 326 aa, Artificial Sequence
  Synthetic
MSELNTARGTIDTADLGVTLMHEHVFIMTTEIALNYPEAWGDEEKRVADAVARLNELKSRGVDTIVDLTVIGLGRYIPRIARVAAQTELNIVVATGLYTYNDIPFRFHYEGPGGMLDGPEIMTDMFVRDIEQGIADTGIKAGILKCATDEPGITPGVERVLRAVAQAHKRTGVPISTHTHAGLRRGLEQQRIFEEEGVDLTRVIIGHSGDSTDVGYLEELISAGSYLGMDRFGLDVLLPFEERVQIVATMCERGHADKMVLSHDINCYFDALPEQLVPQMAPNWHYLHIHNDVIPALKHRGVTDEQIHTMLVENPRKIFDRQGAYQ

SEQ ID NO: 761 - protein, 326 aa, Artificial Sequence
  Synthetic
MSELNTARGTIDTADLGVTLMHEHVFIMTTEIALNYPEAWGDEEKRVADAVARLNELKSRGVDTIVDLTVIGLGRYIPRIARVAAQTELNIVVATGLYTYNDIPFRFHYEGPGGMLDGPEIMTDMFVRDIEQGIADTGIKAGILKCATDEPGITPGVERVLRAVAQAHKRTGVPISTHTHAGLRRGLEQQRIFEEEGVDLTRVIIGHSGDSTDVGYLEELISAGSYLGMDRFGLDVLLPFEERVQIVATMCERGHADKMVLSHDLNCYFDALPEQLVPQMAPNWHYLHIHNDVIPALKHRGVTDEQIHTMLVENPRKIFDRQGAYQ

SEQ ID NO: 762 - protein, 326 aa, Artificial Sequence
  Synthetic
MSELNTARGTIDTADLGVTLMHEHVFIMTTEIALNYPEAWGDEEKRVADAVARLNELKSRGVDTIVDLTVIGLGRYIPRIARVAAQTELNIVVATGLYTYNDIPFRFHYEGPGGMLDGPEIMTDMFVRDIEQGIADTGIKAGILKCATDEPGITPGVERVLRAVAQAHKRTGVPISTHTHAGLRRGLEQQRIFEEEGVDLTRVIIGHSGDSTDVGYLEELISAGSYLGMDRFGLDVLLPFEERVQIVATMCERGHADKMVLSHDMNCYFDALPEQLVPQMAPNWHYLHIHNDVIPALKHRGVTDEQIHTMLVENPRKIFDRQGAYQ

SEQ ID NO: 763 - protein, 326 aa, Artificial Sequence
  Synthetic
MSELNTARGTIDTADLGVTLMHEHVFIMTTEIALNYPEAWGDEEKRVADAVARLNELKSRGVDTIVDLTVIGLGRYIPRIARVAAQTELNIVVATGLYTYNDIPFRFHYEGPGGMLDGPEIMTDMFVRDIEQGIADTGIKAGILKCATDEPGITPGVERVLRAVAQAHKRTGVPISTHTHAGLRRGLEQQRIFEEEGVDLTRVIIGHSGDSTDVGYLEELISAGSYLGMDRFGLDVLLPFEERVQIVATMCERGHADKMVLSHDQNCYFDALPEQLVPQMAPNWHYLHIHNDVIPALKHRGVTDEQIHTMLVENPRKIFDRQGAYQ

SEQ ID NO: 764 - protein, 326 aa, Artificial Sequence
  Synthetic
MSELNTARGTIDTADLGVTLMHEHVFIMTTEIALNYPEAWGDEEKRVADAVARLNELKSRGVDTIVDLTVIGLGRYIPRIARVAAQTELNIVVATGLYTYNDIPFRFHYEGPGGMLDGPEIMTDMFVRDIEQGIADTGIKAGILKCATDEPGITPGVERVLRAVAQAHKRTGVPISTHTHAGLRRGLEQQRIFEEEGVDLTRVIIGHSGDSTDVGYLEELISAGSYLGMDRFGLDVLLPFEERVQIVATMCERGHADKMVLSHDSNCYFDALPEQLVPQMAPNWHYLHIHNDVIPALKHRGVTDEQIHTMLVENPRKIFDRQGAYQ

SEQ ID NO: 765 - protein, 326 aa, Artificial Sequence
  Synthetic
MSELNTARGTIDTADLGVTLMHEHVFIMTTEIALNYPEAWGDEEKRVADAVARLNELKSRGVDTIVDLTVIGLGRYIPRIARVAAQTELNIVVATGLYTYNDIPFRFHYEGPGGMLDGPEIMTDMFVRDIEQGIADTGIKAGILKCATDEPGITPGVERVLRAVAQAHKRTGVPISTHTHAGLRRGLEQQRIFEEEGVDLTRVIIGHSGDSTDVGYLEELISAGSYLGMDRFGLDVLLPFEERVQIVATMCERGHADKMVLSHDTNCYFDALPEQLVPQMAPNWHYLHIHNDVIPALKHRGVTDEQIHTMLVENPRKIFDRQGAYQ

SEQ ID NO: 766 - protein, 326 aa, Artificial Sequence
  Synthetic
MSELNTARGTIDTADLGVTLMHEHVFIMTTEIALNYPEAWGDEEKRVADAVARLNELKSRGVDTIVDLTVIGLGRYIPRIARVAAQTELNIVVATGLYTYNDIPFRFHYEGPGGMLDGPEIMTDMFVRDIEQGIADTGIKAGILKCATDEPGITPGVERVLRAVAQAHKRTGVPISTHTHAGLRRGLEQQRIFEEEGVDLTRVIIGHSGDSTDVGYLEELISAGSYLGMDRFGLDVLLPFEERVQIVATMCERGHADKMVLSHDVNCYFDALPEQLVPQMAPNWHYLHIHNDVIPALKHRGVTDEQIHTMLVENPRKIFDRQGAYQ

SEQ ID NO: 767 - protein, 326 aa, Artificial Sequence
  Synthetic
MSELNTARGTIDTADLGVTLMHEHVFIMTTEIALNYPEAWGDEEKRVADAVARLNELKSRGVDTIVDLTVIGLGRYIPRIARVAAQTELNIVVATGLYTYNDIPFRFHYEGPGGMLDGPEIMTDMFVRDIEQGIADTGIKAGILKCATDEPGITPGVERVLRAVAQAHKRTGVPISTHTHAGLRRGLEQQRIFEEEGVDLTRVIIGHSGDSTDVGYLEELISAGSYLGMDRFGLDVLLPFEERVQIVATMCERGHADKMVLSHDWNCYFDALPEQLVPQMAPNWHYLHIHNDVIPALKHRGVTDEQIHTMLVENPRKIFDRQGAYQ

SEQ ID NO: 768 - protein, 326 aa, Artificial Sequence
  Synthetic
MSELNTARGTIDTADLGVTLMHEHVFIMTTEIALNYPEAWGDEEKRVADAVARLNELKSRGVDTIVDLTVIGLGRYIPRIARVAAQTELNIVVATGLYTYNDIPFRFHYEGPGGMLDGPEIMTDMFVRDIEQGIADTGIKAGILKCATDEPGITPGVERVLRAVAQAHKRTGVPISTHTHAGLRRGLEQQRIFEEEGVDLTRVIIGHSGDSTDVGYLEELISAGSYLGMDRFGLDVLLPFEERVQIVATMCERGHADKMVLSHDYNCYFDALPEQLVPQMAPNWHYLHIHNDVIPALKHRGVTDEQIHTMLVENPRKIFDRQGAYQ

SEQ ID NO: 769 - protein, 326 aa, Artificial Sequence
  Synthetic
MSELNTARGTIDTADLGVTLMHEHVFIMTTEIALNYPEAWGDEEKRVADAVARLNELKSRGVDTIVDLTVIGLGRYIPRIARVAAQTELNIVVATGLYTYNDIPFRFHYEGPGGMLDGPEIMTDMFVRDIEQGIADTGIKAGILKCATDEPGITPGVERVLRAVAQAHKRTGVPISTHTHAGLRRGLEQQRIFEEEGVDLTRVIIGHSGDSTDVGYLEELISAGSYLGMDRFGLDVLLPFEERVQIVATMCERGHADKMVLSHDAACYFDALPEQLVPQMAPNWHYLHIHNDVIPALKHRGVTDEQIHTMLVENPRKIFDRQGAYQ

SEQ ID NO: 770 - protein, 326 aa, Artificial Sequence
  Synthetic
MSELNTARGTIDTADLGVTLMHEHVFIMTTEIALNYPEAWGDEEKRVADAVARLNELKSRGVDTIVDLTVIGLGRYIPRIARVAAQTELNIVVATGLYTYNDIPFRFHYEGPGGMLDGPEIMTDMFVRDIEQGIADTGIKAGILKCATDEPGITPGVERVLRAVAQAHKRTGVPISTHTHAGLRRGLEQQRIFEEEGVDLTRVIIGHSGDSTDVGYLEELISAGSYLGMDRFGLDVLLPFEERVQIVATMCERGHADKMVLSHDACCYFDALPEQLVPQMAPNWHYLHIHNDVIPALKHRGVTDEQIHTMLVENPRKIFDRQGAYQ

SEQ ID NO: 771 - protein, 326 aa, Artificial Sequence
  Synthetic
MSELNTARGTIDTADLGVTLMHEHVFIMTTEIALNYPEAWGDEEKRVADAVARLNELKSRGVDTIVDLTVIGLGRYIPRIARVAAQTELNIVVATGLYTYNDIPFRFHYEGPGGMLDGPEIMTDMFVRDIEQGIADTGIKAGILKCATDEPGITPGVERVLRAVAQAHKRTGVPISTHTHAGLRRGLEQQRIFEEEGVDLTRVIIGHSGDSTDVGYLEELISAGSYLGMDRFGLDVLLPFEERVQIVATMCERGHADKMVLSHDAGCYFDALPEQLVPQMAPNWHYLHIHNDVIPALKHRGVTDEQIHTMLVENPRKIFDRQGAYQ

SEQ ID NO: 772 - protein, 326 aa, Artificial Sequence
  Synthetic
MSELNTARGTIDTADLGVTLMHEHVFIMTTEIALNYPEAWGDEEKRVADAVARLNELKSRGVDTIVDLTVIGLGRYIPRIARVAAQTELNIVVATGLYTYNDIPFRFHYEGPGGMLDGPEIMTDMFVRDIEQGIADTGIKAGILKCATDEPGITPGVERVLRAVAQAHKRTGVPISTHTHAGLRRGLEQQRIFEEEGVDLTRVIIGHSGDSTDVGYLEELISAGSYLGMDRFGLDVLLPFEERVQIVATMCERGHADKMVLSHDAHCYFDALPEQLVPQMAPNWHYLHIHNDVIPALKHRGVTDEQIHTMLVENPRKIFDRQGAYQ

SEQ ID NO: 773 - protein, 326 aa, Artificial Sequence
  Synthetic
MSELNTARGTIDTADLGVTLMHEHVFIMTTEIALNYPEAWGDEEKRVADAVARLNELKSRGVDTIVDLTVIGLGRYIPRIARVAAQTELNIVVATGLYTYNDIPFRFHYEGPGGMLDGPEIMTDMFVRDIEQGIADTGIKAGILKCATDEPGITPGVERVLRAVAQAHKRTGVPISTHTHAGLRRGLEQQRIFEEEGVDLTRVIIGHSGDSTDVGYLEELISAGSYLGMDRFGLDVLLPFEERVQIVATMCERGHADKMVLSHDARCYFDALPEQLVPQMAPNWHYLHIHNDVIPALKHRGVTDEQIHTMLVENPRKIFDRQGAYQ

SEQ ID NO: 774 - protein, 326 aa, Artificial Sequence
  Synthetic
MSELNTARGTIDTADLGVTLMHEHVFIMTTEIALNYPEAWGDEEKRVADAVARLNELKSRGVDTIVDLTVIGLGRYIPRIARVAAQTELNIVVATGLYTYNDIPFRFHYEGPGGMLDGPEIMTDMFVRDIEQGIADTGIKAGILKCATDEPGITPGVERVLRAVAQAHKRTGVPISTHTHAGLRRGLEQQRIFEEEGVDLTRVIIGHSGDSTDVGYLEELISAGSYLGMDRFGLDVLLPFEERVQIVATMCERGHADKMVLSHDASCYFDALPEQLVPQMAPNWHYLHIHNDVIPALKHRGVTDEQIHTMLVENPRKIFDRQGAYQ

SEQ ID NO: 775 - protein, 326 aa, Artificial Sequence
  Synthetic
MSELNTARGTIDTADLGVTLMHEHVFIMTTEIALNYPEAWGDEEKRVADAVARLNELKSRGVDTIVDLTVIGLGRYIPRIARVAAQTELNIVVATGLYTYNDIPFRFHYEGPGGMLDGPEIMTDMFVRDIEQGIADTGIKAGILKCATDEPGITPGVERVLRAVAQAHKRTGVPISTHTHAGLRRGLEQQRIFEEEGVDLTRVIIGHSGDSTDVGYLEELISAGSYLGMDRFGLDVLLPFEERVQIVATMCERGHADKMVLSHDATCYFDALPEQLVPQMAPNWHYLHIHNDVIPALKHRGVTDEQIHTMLVENPRKIFDRQGAYQ

SEQ ID NO: 776 - protein, 326 aa, Artificial Sequence
  Synthetic
MSELNTARGTIDTADLGVTLMHEHVFIMTTEIALNYPEAWGDEEKRVADAVARLNELKSRGVDTIVDLTVIGLGRYIPRIARVAAQTELNIVVATGLYTYNDIPFRFHYEGPGGMLDGPEIMTDMFVRDIEQGIADTGIKAGILKCATDEPGITPGVERVLRAVAQAHKRTGVPISTHTHAGLRRGLEQQRIFEEEGVDLTRVIIGHSGDSTDVGYLEELISAGSYLGMDRFGLDVLLPFEERVQIVATMCERGHADKMVLSHDANAYFDALPEQLVPQMAPNWHYLHIHNDVIPALKHRGVTDEQIHTMLVENPRKIFDRQGAYQ

SEQ ID NO: 777 - protein, 326 aa, Artificial Sequence
  Synthetic
MSELNTARGTIDTADLGVTLMHEHVFIMTTEIALNYPEAWGDEEKRVADAVARLNELKSRGVDTIVDLTVIGLGRYIPRIARVAAQTELNIVVATGLYTYNDIPFRFHYEGPGGMLDGPEIMTDMFVRDIEQGIADTGIKAGILKCATDEPGITPGVERVLRAVAQAHKRTGVPISTHTHAGLRRGLEQQRIFEEEGVDLTRVIIGHSGDSTDVGYLEELISAGSYLGMDRFGLDVLLPFEERVQIVATMCERGHADKMVLSHDANGYFDALPEQLVPQMAPNWHYLHIHNDVIPALKHRGVTDEQIHTMLVENPRKIFDRQGAYQ

SEQ ID NO: 778 - protein, 326 aa, Artificial Sequence
  Synthetic
MSELNTARGTIDTADLGVTLMHEHVFIMTTEIALNYPEAWGDEEKRVADAVARLNELKSRGVDTIVDLTVIGLGRYIPRIARVAAQTELNIVVATGLYTYNDIPFRFHYEGPGGMLDGPEIMTDMFVRDIEQGIADTGIKAGILKCATDEPGITPGVERVLRAVAQAHKRTGVPISTHTHAGLRRGLEQQRIFEEEGVDLTRVIIGHSGDSTDVGYLEELISAGSYLGMDRFGLDVLLPFEERVQIVATMCERGHADKMVLSHDANTYFDALPEQLVPQMAPNWHYLHIHNDVIPALKHRGVTDEQIHTMLVENPRKIFDRQGAYQ

SEQ ID NO: 779 - protein, 326 aa, Artificial Sequence
  Synthetic
MSELNTARGTIDTADLGVTLMHEHVFIMTTEIALNYPEAWGDEEKRVADAVARLNELKSRGVDTIVDLTVIGLGRYIPRIARVAAQTELNIVVATGLYTYNDIPFRFHYEGPGGMLDGPEIMTDMFVRDIEQGIADTGIKAGILKCATDEPGITPGVERVLRAVAQAHKRTGVPISTHTHAGLRRGLEQQRIFEEEGVDLTRVIIGHSGDSTDVGYLEELISAGSYLGMDRFGLDVLLPFEERVQIVATMCERGHADKMVLSHDANWYFDALPEQLVPQMAPNWHYLHIHNDVIPALKHRGVTDEQIHTMLVENPRKIFDRQGAYQ

SEQ ID NO: 780 - protein, 326 aa, Artificial Sequence
  Synthetic
MSELNTARGTIDTADLGVTLMHEHVFIMTTEIALNYPEAWGDEEKRVADAVARLNELKSRGVDTIVDLTVIGLGRYIPRIARVAAQTELNIVVATGLYTYNDIPFRFHYEGPGGMLDGPEIMTDMFVRDIEQGIADTGIKAGILKCATDEPGITPGVERVLRAVAQAHKRTGVPISTHTHAGLRRGLEQQRIFEEEGVDLTRVIIGHSGDSTDVGYLEELISAGSYLGMDRFGLDVLLPFEERVQIVATMCERGHADKMVLSHDANCYFDALPEQLVPQMAPNCHYLHIHNDVIPALKHRGVTDEQIHTMLVENPRKIFDRQGAYQ

SEQ ID NO: 781 - protein, 326 aa, Artificial Sequence
  Synthetic
MSELNTARGTIDTADLGVTLMHEHVFIMTTEIALNYPEAWGDEEKRVADAVARLNELKSRGVDTIVDLTVIGLGRYIPRIARVAAQTELNIVVATGLYTYNDIPFRFHYEGPGGMLDGPEIMTDMFVRDIEQGIADTGIKAGILKCATDEPGITPGVERVLRAVAQAHKRTGVPISTHTHAGLRRGLEQQRIFEEEGVDLTRVIIGHSGDSTDVGYLEELISAGSYLGMDRFGLDVLLPFEERVQIVATMCERGHADKMVLSHDANCYFDALPEQLVPQMAPNDHYLHIHNDVIPALKHRGVTDEQIHTMLVENPRKIFDRQGAYQ

SEQ ID NO: 782 - protein, 326 aa, Artificial Sequence
  Synthetic
MSELNTARGTIDTADLGVTLMHEHVFIMTTEIALNYPEAWGDEEKRVADAVARLNELKSRGVDTIVDLTVIGLGRYIPRIARVAAQTELNIVVATGLYTYNDIPFRFHYEGPGGMLDGPEIMTDMFVRDIEQGIADTGIKAGILKCATDEPGITPGVERVLRAVAQAHKRTGVPISTHTHAGLRRGLEQQRIFEEEGVDLTRVIIGHSGDSTDVGYLEELISAGSYLGMDRFGLDVLLPFEERVQIVATMCERGHADKMVLSHDANCYFDALPEQLVPQMAPNEHYLHIHNDVIPALKHRGVTDEQIHTMLVENPRKIFDRQGAYQ

SEQ ID NO: 783 - protein, 326 aa, Artificial Sequence
  Synthetic
MSELNTARGTIDTADLGVTLMHEHVFIMTTEIALNYPEAWGDEEKRVADAVARLNELKSRGVDTIVDLTVIGLGRYIPRIARVAAQTELNIVVATGLYTYNDIPFRFHYEGPGGMLDGPEIMTDMFVRDIEQGIADTGIKAGILKCATDEPGITPGVERVLRAVAQAHKRTGVPISTHTHAGLRRGLEQQRIFEEEGVDLTRVIIGHSGDSTDVGYLEELISAGSYLGMDRFGLDVLLPFEERVQIVATMCERGHADKMVLSHDANCYFDALPEQLVPQMAPNFHYLHIHNDVIPALKHRGVTDEQIHTMLVENPRKIFDRQGAYQ

SEQ ID NO: 784 - protein, 326 aa, Artificial Sequence
  Synthetic
MSELNTARGTIDTADLGVTLMHEHVFIMTTEIALNYPEAWGDEEKRVADAVARLNELKSRGVDTIVDLTVIGLGRYIPRIARVAAQTELNIVVATGLYTYNDIPFRFHYEGPGGMLDGPEIMTDMFVRDIEQGIADTGIKAGILKCATDEPGITPGVERVLRAVAQAHKRTGVPISTHTHAGLRRGLEQQRIFEEEGVDLTRVIIGHSGDSTDVGYLEELISAGSYLGMDRFGLDVLLPFEERVQIVATMCERGHADKMVLSHDANCYFDALPEQLVPQMAPNHHYLHIHNDVIPALKHRGVTDEQIHTMLVENPRKIFDRQGAYQ

SEQ ID NO: 785 - protein, 326 aa, Artificial Sequence
  Synthetic
MSELNTARGTIDTADLGVTLMHEHVFIMTTEIALNYPEAWGDEEKRVADAVARLNELKSRGVDTIVDLTVIGLGRYIPRIARVAAQTELNIVVATGLYTYNDIPFRFHYEGPGGMLDGPEIMTDMFVRDIEQGIADTGIKAGILKCATDEPGITPGVERVLRAVAQAHKRTGVPISTHTHAGLRRGLEQQRIFEEEGVDLTRVIIGHSGDSTDVGYLEELISAGSYLGMDRFGLDVLLPFEERVQIVATMCERGHADKMVLSHDANCYFDALPEQLVPQMAPNKHYLHIHNDVIPALKHRGVTDEQIHTMLVENPRKIFDRQGAYQ

SEQ ID NO: 786 - protein, 326 aa, Artificial Sequence
  Synthetic
MSELNTARGTIDTADLGVTLMHEHVFIMTTEIALNYPEAWGDEEKRVADAVARLNELKSRGVDTIVDLTVIGLGRYIPRIARVAAQTELNIVVATGLYTYNDIPFRFHYEGPGGMLDGPEIMTDMFVRDIEQGIADTGIKAGILKCATDEPGITPGVERVLRAVAQAHKRTGVPISTHTHAGLRRGLEQQRIFEEEGVDLTRVIIGHSGDSTDVGYLEELISAGSYLGMDRFGLDVLLPFEERVQIVATMCERGHADKMVLSHDANCYFDALPEQLVPQMAPNMHYLHIHNDVIPALKHRGVTDEQIHTMLVENPRKIFDRQGAYQ

SEQ ID NO: 787 - protein, 326 aa, Artificial Sequence
  Synthetic
MSELNTARGTIDTADLGVTLMHEHVFIMTTEIALNYPEAWGDEEKRVADAVARLNELKSRGVDTIVDLTVIGLGRYIPRIARVAAQTELNIVVATGLYTYNDIPFRFHYEGPGGMLDGPEIMTDMFVRDIEQGIADTGIKAGILKCATDEPGITPGVERVLRAVAQAHKRTGVPISTHTHAGLRRGLEQQRIFEEEGVDLTRVIIGHSGDSTDVGYLEELISAGSYLGMDRFGLDVLLPFEERVQIVATMCERGHADKMVLSHDANCYFDALPEQLVPQMAPNNHYLHIHNDVIPALKHRGVTDEQIHTMLVENPRKIFDRQGAYQ

SEQ ID NO: 788 - protein, 326 aa, Artificial Sequence
  Synthetic
MSELNTARGTIDTADLGVTLMHEHVFIMTTEIALNYPEAWGDEEKRVADAVARLNELKSRGVDTIVDLTVIGLGRYIPRIARVAAQTELNIVVATGLYTYNDIPFRFHYEGPGGMLDGPEIMTDMFVRDIEQGIADTGIKAGILKCATDEPGITPGVERVLRAVAQAHKRTGVPISTHTHAGLRRGLEQQRIFEEEGVDLTRVIIGHSGDSTDVGYLEELISAGSYLGMDRFGLDVLLPFEERVQIVATMCERGHADKMVLSHDANCYFDALPEQLVPQMAPNPHYLHIHNDVIPALKHRGVTDEQIHTMLVENPRKIFDRQGAYQ

SEQ ID NO: 789 - protein, 326 aa, Artificial Sequence
  Synthetic
MSELNTARGTIDTADLGVTLMHEHVFIMTTEIALNYPEAWGDEEKRVADAVARLNELKSRGVDTIVDLTVIGLGRYIPRIARVAAQTELNIVVATGLYTYNDIPFRFHYEGPGGMLDGPEIMTDMFVRDIEQGIADTGIKAGILKCATDEPGITPGVERVLRAVAQAHKRTGVPISTHTHAGLRRGLEQQRIFEEEGVDLTRVIIGHSGDSTDVGYLEELISAGSYLGMDRFGLDVLLPFEERVQIVATMCERGHADKMVLSHDANCYFDALPEQLVPQMAPNQHYLHIHNDVIPALKHRGVTDEQIHTMLVENPRKIFDRQGAYQ

SEQ ID NO: 790 - protein, 326 aa, Artificial Sequence
  Synthetic
MSELNTARGTIDTADLGVTLMHEHVFIMTTEIALNYPEAWGDEEKRVADAVARLNELKSRGVDTIVDLTVIGLGRYIPRIARVAAQTELNIVVATGLYTYNDIPFRFHYEGPGGMLDGPEIMTDMFVRDIEQGIADTGIKAGILKCATDEPGITPGVERVLRAVAQAHKRTGVPISTHTHAGLRRGLEQQRIFEEEGVDLTRVIIGHSGDSTDVGYLEELISAGSYLGMDRFGLDVLLPFEERVQIVATMCERGHADKMVLSHDANCYFDALPEQLVPQMAPNRHYLHIHNDVIPALKHRGVTDEQIHTMLVENPRKIFDRQGAYQ

SEQ ID NO: 791 - protein, 326 aa, Artificial Sequence
  Synthetic
MSELNTARGTIDTADLGVTLMHEHVFIMTTEIALNYPEAWGDEEKRVADAVARLNELKSRGVDTIVDLTVIGLGRYIPRIARVAAQTELNIVVATGLYTYNDIPFRFHYEGPGGMLDGPEIMTDMFVRDIEQGIADTGIKAGILKCATDEPGITPGVERVLRAVAQAHKRTGVPISTHTHAGLRRGLEQQRIFEEEGVDLTRVIIGHSGDSTDVGYLEELISAGSYLGMDRFGLDVLLPFEERVQIVATMCERGHADKMVLSHDANCYFDALPEQLVPQMAPNTHYLHIHNDVIPALKHRGVTDEQIHTMLVENPRKIFDRQGAYQ

SEQ ID NO: 792 - protein, 326 aa, Artificial Sequence
  Synthetic
MSELNTARGTIDTADLGVTLMHEHVFIMTTEIALNYPEAWGDEEKRVADAVARLNELKSRGVDTIVDLTVIGLGRYIPRIARVAAQTELNIVVATGLYTYNDIPFRFHYEGPGGMLDGPEIMTDMFVRDIEQGIADTGIKAGILKCATDEPGITPGVERVLRAVAQAHKRTGVPISTHTHAGLRRGLEQQRIFEEEGVDLTRVIIGHSGDSTDVGYLEELISAGSYLGMDRFGLDVLLPFEERVQIVATMCERGHADKMVLSHDANCYFDALPEQLVPQMAPNYHYLHIHNDVIPALKHRGVTDEQIHTMLVENPRKIFDRQGAYQ

SEQ ID NO: 793 - protein, 326 aa, Artificial Sequence
  Synthetic
MSELNTARGTIDTADLGVTLMHEHVFIMTTEIALNYPEAWGDEEKRVADAVARLNELKSRGVDTIVDLTVIGLGRYIPRIARVAAQTELNIVVATGLYTYNDIPFRFHYEGPGGMLDGPEIMTDMFVRDIEQGIADTGIKAGILKCATDEPGITPGVERVLRAVAQAHKRTGVPISTHTHAGLRRGLEQQRIFEEEGVDLTRVIIGHSGDSTDVGYLEELISAGSYLGMDRFGLDVLLPFEERVQIVATMCERGHADKMVLSHDANCYFDALPEQLVPQMAPNWHFLHIHNDVIPALKHRGVTDEQIHTMLVENPRKIFDRQGAYQ

SEQ ID NO: 794 - protein, 326 aa, Artificial Sequence
  Synthetic
MSELNTARGTIDTADLGVTLMHEHVFIMTTEIALNYPEAWGDEEKRVADAVARLNELKSRGVDTIVDLTVIGLGRYIPRIARVAAQTELNIVVATGLYTYNDIPFRFHYEGPGGMLDGPEIMTDMFVRDIEQGIADTGIKAGILKCATDEPGITPGVERVLRAVAQAHKRTGVPISTHTHAGLRRGLEQQRIFEEEGVDLTRVIIGHSGDSTDVGYLEELISAGSYLGMDRFGLDVLLPFEERVQIVATMCERGHADKMVLSHDANCYFDALPEQLVPQMAPNWHMLHIHNDVIPALKHRGVTDEQIHTMLVENPRKIFDRQGAYQ

SEQ ID NO: 795 - protein, 326 aa, Artificial Sequence
  Synthetic
MSELNTARGTIDTADLGVTLMHEHVFIMTTEIALNYPEAWGDEEKRVADAVARLNELKSRGVDTIVDLTVIGLGRYIPRIARVAAQTELNIVVATGLYTYNDIPFRFHYEGPGGMLDGPEIMTDMFVRDIEQGIADTGIKAGILKCATDEPGITPGVERVLRAVAQAHKRTGVPISTHTHAGLRRGLEQQRIFEEEGVDLTRVIIGHSGDSTDVGYLEELISAGSYLGMDRFGLDVLLPFEERVQIVATMCERGHADKMVLSHDANCYFDALPEQLVPQMAPNWHWLHIHNDVIPALKHRGVTDEQIHTMLVENPRKIFDRQGAYQ

SEQ ID NO: 796 - protein, 349 aa, Artificial Sequence
  Synthetic
MAAAETGTGHARIETVLGPIAPAALGATIMHEHLLCDLTPPARRGQGLPEPEITLETIFDMGYRPGRYHGNHRLQDVALATREAAAFKADGGGAIVELTTGGIVPDPEGLAAIARGAGIHVVLGAGFYTENFLDAETLALSTEALTEITLGQLTEGAWGTKVRCGLIGEIGCSWPLTPFERRSLKSGARAQIATGAAITIHPGRDRAAPDEILDVLEAEGADLSRVVIGHMDRTLLDDADVVALARRGSIVEYDFFGIEHSNYWLGVVDIPNDWMRIRALRKLFDAGLGDRVVISHDICTRTRLQSLGGHGYGHILRNVVPLMRDRGFSQSEIDLLLLETPRRILTIGG

SEQ ID NO: 797 - protein, 349 aa, Artificial Sequence
  Synthetic
MAAAETGTGHARIETVLGPIAPAALGATLMREHLLCDLTPPARRGQGLPEPEITLETIFDMGYRPGRYHGNHRLQDVALATREAAAFKADGGGAIVELTTGGIVPDPEGLAAIARGAGIHVVLGAGFYTENFLDAETLALSTEALTEITLGQLTEGAWGTKVRCGLIGEIGCSWPLTPFERRSLKSGARAQIATGAAITIHPGRDRAAPDEILDVLEAEGADLSRVVIGHMDRTLLDDADVVALARRGSIVEYDFFGIEHSNYWLGVVDIPNDWMRIRALRKLFDAGLGDRVVISHDICTRTRLQSLGGHGYGHILRNVVPLMRDRGFSQSEIDLLLLETPRRILTIGG

SEQ ID NO: 798 - protein, 349 aa, Artificial Sequence
  Synthetic
MAAAETGTGHARIETVLGPIAPAALGATLMSEHLLCDLTPPARRGQGLPEPEITLETIFDMGYRPGRYHGNHRLQDVALATREAAAFKADGGGAIVELTTGGIVPDPEGLAAIARGAGIHVVLGAGFYTENFLDAETLALSTEALTEITLGQLTEGAWGTKVRCGLIGEIGCSWPLTPFERRSLKSGARAQIATGAAITIHPGRDRAAPDEILDVLEAEGADLSRVVIGHMDRTLLDDADVVALARRGSIVEYDFFGIEHSNYWLGVVDIPNDWMRIRALRKLFDAGLGDRVVISHDICTRTRLQSLGGHGYGHILRNVVPLMRDRGFSQSEIDLLLLETPRRILTIGG

SEQ ID NO: 799 - protein, 349 aa, Artificial Sequence
  Synthetic
MAAAETGTGHARIETVLGPIAPAALGATLMHEHCLCDLTPPARRGQGLPEPEITLETIFDMGYRPGRYHGNHRLQDVALATREAAAFKADGGGAIVELTTGGIVPDPEGLAAIARGAGIHVVLGAGFYTENFLDAETLALSTEALTEITLGQLTEGAWGTKVRCGLIGEIGCSWPLTPFERRSLKSGARAQIATGAAITIHPGRDRAAPDEILDVLEAEGADLSRVVIGHMDRTLLDDADVVALARRGSIVEYDFFGIEHSNYWLGVVDIPNDWMRIRALRKLFDAGLGDRVVISHDICTRTRLQSLGGHGYGHILRNVVPLMRDRGFSQSEIDLLLLETPRRILTIGG

SEQ ID NO: 800 - protein, 349 aa, Artificial Sequence
  Synthetic
MAAAETGTGHARIETVLGPIAPAALGATLMHEHILCDLTPPARRGQGLPEPEITLETIFDMGYRPGRYHGNHRLQDVALATREAAAFKADGGGAIVELTTGGIVPDPEGLAAIARGAGIHVVLGAGFYTENFLDAETLALSTEALTEITLGQLTEGAWGTKVRCGLIGEIGCSWPLTPFERRSLKSGARAQIATGAAITIHPGRDRAAPDEILDVLEAEGADLSRVVIGHMDRTLLDDADVVALARRGSIVEYDFFGIEHSNYWLGVVDIPNDWMRIRALRKLFDAGLGDRVVISHDICTRTRLQSLGGHGYGHILRNVVPLMRDRGFSQSEIDLLLLETPRRILTIGG

SEQ ID NO: 801 - protein, 349 aa, Artificial Sequence
  Synthetic
MAAAETGTGHARIETVLGPIAPAALGATLMHEHMLCDLTPPARRGQGLPEPEITLETIFDMGYRPGRYHGNHRLQDVALATREAAAFKADGGGAIVELTTGGIVPDPEGLAAIARGAGIHVVLGAGFYTENFLDAETLALSTEALTEITLGQLTEGAWGTKVRCGLIGEIGCSWPLTPFERRSLKSGARAQIATGAAITIHPGRDRAAPDEILDVLEAEGADLSRVVIGHMDRTLLDDADVVALARRGSIVEYDFFGIEHSNYWLGVVDIPNDWMRIRALRKLFDAGLGDRVVISHDICTRTRLQSLGGHGYGHILRNVVPLMRDRGFSQSEIDLLLLETPRRILTIGG

SEQ ID NO: 802 - protein, 349 aa, Artificial Sequence
  Synthetic
MAAAETGTGHARIETVLGPIAPAALGATLMHEHVLCDLTPPARRGQGLPEPEITLETIFDMGYRPGRYHGNHRLQDVALATREAAAFKADGGGAIVELTTGGIVPDPEGLAAIARGAGIHVVLGAGFYTENFLDAETLALSTEALTEITLGQLTEGAWGTKVRCGLIGEIGCSWPLTPFERRSLKSGARAQIATGAAITIHPGRDRAAPDEILDVLEAEGADLSRVVIGHMDRTLLDDADVVALARRGSIVEYDFFGIEHSNYWLGVVDIPNDWMRIRALRKLFDAGLGDRVVISHDICTRTRLQSLGGHGYGHILRNVVPLMRDRGFSQSEIDLLLLETPRRILTIGG

SEQ ID NO: 803 - protein, 349 aa, Artificial Sequence
  Synthetic
MAAAETGTGHARIETVLGPIAPAALGATLMHEHLICDLTPPARRGQGLPEPEITLETIFDMGYRPGRYHGNHRLQDVALATREAAAFKADGGGAIVELTTGGIVPDPEGLAAIARGAGIHVVLGAGFYTENFLDAETLALSTEALTEITLGQLTEGAWGTKVRCGLIGEIGCSWPLTPFERRSLKSGARAQIATGAAITIHPGRDRAAPDEILDVLEAEGADLSRVVIGHMDRTLLDDADVVALARRGSIVEYDFFGIEHSNYWLGVVDIPNDWMRIRALRKLFDAGLGDRVVISHDICTRTRLQSLGGHGYGHILRNVVPLMRDRGFSQSEIDLLLLETPRRILTIGG

SEQ ID NO: 804 - protein, 349 aa, Artificial Sequence
  Synthetic
MAAAETGTGHARIETVLGPIAPAALGATLMHEHLMCDLTPPARRGQGLPEPEITLETIFDMGYRPGRYHGNHRLQDVALATREAAAFKADGGGAIVELTTGGIVPDPEGLAAIARGAGIHVVLGAGFYTENFLDAETLALSTEALTEITLGQLTEGAWGTKVRCGLIGEIGCSWPLTPFERRSLKSGARAQIATGAAITIHPGRDRAAPDEILDVLEAEGADLSRVVIGHMDRTLLDDADVVALARRGSIVEYDFFGIEHSNYWLGVVDIPNDWMRIRALRKLFDAGLGDRVVISHDICTRTRLQSLGGHGYGHILRNVVPLMRDRGFSQSEIDLLLLETPRRILTIGG

SEQ ID NO: 805 - protein, 349 aa, Artificial Sequence
  Synthetic
MAAAETGTGHARIETVLGPIAPAALGATLMHEHLLCDLTPPARRGQGLPEPEITLETIFDMGYRPGRYHGNCRLQDVALATREAAAFKADGGGAIVELTTGGIVPDPEGLAAIARGAGIHVVLGAGFYTENFLDAETLALSTEALTEITLGQLTEGAWGTKVRCGLIGEIGCSWPLTPFERRSLKSGARAQIATGAAITIHPGRDRAAPDEILDVLEAEGADLSRVVIGHMDRTLLDDADVVALARRGSIVEYDFFGIEHSNYWLGVVDIPNDWMRIRALRKLFDAGLGDRVVISHDICTRTRLQSLGGHGYGHILRNVVPLMRDRGFSQSEIDLLLLETPRRILTIGG

SEQ ID NO: 806 - protein, 349 aa, Artificial Sequence
  Synthetic
MAAAETGTGHARIETVLGPIAPAALGATLMHEHLLCDLTPPARRGQGLPEPEITLETIFDMGYRPGRYHGNDRLQDVALATREAAAFKADGGGAIVELTTGGIVPDPEGLAAIARGAGIHVVLGAGFYTENFLDAETLALSTEALTEITLGQLTEGAWGTKVRCGLIGEIGCSWPLTPFERRSLKSGARAQIATGAAITIHPGRDRAAPDEILDVLEAEGADLSRVVIGHMDRTLLDDADVVALARRGSIVEYDFFGIEHSNYWLGVVDIPNDWMRIRALRKLFDAGLGDRVVISHDICTRTRLQSLGGHGYGHILRNVVPLMRDRGFSQSEIDLLLLETPRRILTIGG

SEQ ID NO: 807 - protein, 349 aa, Artificial Sequence
  Synthetic
MAAAETGTGHARIETVLGPIAPAALGATLMHEHLLCDLTPPARRGQGLPEPEITLETIFDMGYRPGRYHGNERLQDVALATREAAAFKADGGGAIVELTTGGIVPDPEGLAAIARGAGIHVVLGAGFYTENFLDAETLALSTEALTEITLGQLTEGAWGTKVRCGLIGEIGCSWPLTPFERRSLKSGARAQIATGAAITIHPGRDRAAPDEILDVLEAEGADLSRVVIGHMDRTLLDDADVVALARRGSIVEYDFFGIEHSNYWLGVVDIPNDWMRIRALRKLFDAGLGDRVVISHDICTRTRLQSLGGHGYGHILRNVVPLMRDRGFSQSEIDLLLLETPRRILTIGG

SEQ ID NO: 808 - protein, 349 aa, Artificial Sequence
  Synthetic
MAAAETGTGHARIETVLGPIAPAALGATLMHEHLLCDLTPPARRGQGLPEPEITLETIFDMGYRPGRYHGNFRLQDVALATREAAAFKADGGGAIVELTTGGIVPDPEGLAAIARGAGIHVVLGAGFYTENFLDAETLALSTEALTEITLGQLTEGAWGTKVRCGLIGEIGCSWPLTPFERRSLKSGARAQIATGAAITIHPGRDRAAPDEILDVLEAEGADLSRVVIGHMDRTLLDDADVVALARRGSIVEYDFFGIEHSNYWLGVVDIPNDWMRIRALRKLFDAGLGDRVVISHDICTRTRLQSLGGHGYGHILRNVVPLMRDRGFSQSEIDLLLLETPRRILTIGG

SEQ ID NO: 809 - protein, 349 aa, Artificial Sequence
  Synthetic
MAAAETGTGHARIETVLGPIAPAALGATLMHEHLLCDLTPPARRGQGLPEPEITLETIFDMGYRPGRYHGNMRLQDVALATREAAAFKADGGGAIVELTTGGIVPDPEGLAAIARGAGIHVVLGAGFYTENFLDAETLALSTEALTEITLGQLTEGAWGTKVRCGLIGEIGCSWPLTPFERRSLKSGARAQIATGAAITIHPGRDRAAPDEILDVLEAEGADLSRVVIGHMDRTLLDDADVVALARRGSIVEYDFFGIEHSNYWLGVVDIPNDWMRIRALRKLFDAGLGDRVVISHDICTRTRLQSLGGHGYGHILRNVVPLMRDRGFSQSEIDLLLLETPRRILTIGG

SEQ ID NO: 810 - protein, 349 aa, Artificial Sequence
  Synthetic
MAAAETGTGHARIETVLGPIAPAALGATLMHEHLLCDLTPPARRGQGLPEPEITLETIFDMGYRPGRYHGNNRLQDVALATREAAAFKADGGGAIVELTTGGIVPDPEGLAAIARGAGIHVVLGAGFYTENFLDAETLALSTEALTEITLGQLTEGAWGTKVRCGLIGEIGCSWPLTPFERRSLKSGARAQIATGAAITIHPGRDRAAPDEILDVLEAEGADLSRVVIGHMDRTLLDDADVVALARRGSIVEYDFFGIEHSNYWLGVVDIPNDWMRIRALRKLFDAGLGDRVVISHDICTRTRLQSLGGHGYGHILRNVVPLMRDRGFSQSEIDLLLLETPRRILTIGG

SEQ ID NO: 811 - protein, 349 aa, Artificial Sequence
  Synthetic
MAAAETGTGHARIETVLGPIAPAALGATLMHEHLLCDLTPPARRGQGLPEPEITLETIFDMGYRPGRYHGNQRLQDVALATREAAAFKADGGGAIVELTTGGIVPDPEGLAAIARGAGIHVVLGAGFYTENFLDAETLALSTEALTEITLGQLTEGAWGTKVRCGLIGEIGCSWPLTPFERRSLKSGARAQIATGAAITIHPGRDRAAPDEILDVLEAEGADLSRVVIGHMDRTLLDDADVVALARRGSIVEYDFFGIEHSNYWLGVVDIPNDWMRIRALRKLFDAGLGDRVVISHDICTRTRLQSLGGHGYGHILRNVVPLMRDRGFSQSEIDLLLLETPRRILTIGG

SEQ ID NO: 812 - protein, 349 aa, Artificial Sequence
  Synthetic
MAAAETGTGHARIETVLGPIAPAALGATLMHEHLLCDLTPPARRGQGLPEPEITLETIFDMGYRPGRYHGNRRLQDVALATREAAAFKADGGGAIVELTTGGIVPDPEGLAAIARGAGIHVVLGAGFYTENFLDAETLALSTEALTEITLGQLTEGAWGTKVRCGLIGEIGCSWPLTPFERRSLKSGARAQIATGAAITIHPGRDRAAPDEILDVLEAEGADLSRVVIGHMDRTLLDDADVVALARRGSIVEYDFFGIEHSNYWLGVVDIPNDWMRIRALRKLFDAGLGDRVVISHDICTRTRLQSLGGHGYGHILRNVVPLMRDRGFSQSEIDLLLLETPRRILTIGG

SEQ ID NO: 813 - protein, 349 aa, Artificial Sequence
  Synthetic
MAAAETGTGHARIETVLGPIAPAALGATLMHEHLLCDLTPPARRGQGLPEPEITLETIFDMGYRPGRYHGNWRLQDVALATREAAAFKADGGGAIVELTTGGIVPDPEGLAAIARGAGIHVVLGAGFYTENFLDAETLALSTEALTEITLGQLTEGAWGTKVRCGLIGEIGCSWPLTPFERRSLKSGARAQIATGAAITIHPGRDRAAPDEILDVLEAEGADLSRVVIGHMDRTLLDDADVVALARRGSIVEYDFFGIEHSNYWLGVVDIPNDWMRIRALRKLFDAGLGDRVVISHDICTRTRLQSLGGHGYGHILRNVVPLMRDRGFSQSEIDLLLLETPRRILTIGG

SEQ ID NO: 814 - protein, 349 aa, Artificial Sequence
  Synthetic
MAAAETGTGHARIETVLGPIAPAALGATLMHEHLLCDLTPPARRGQGLPEPEITLETIFDMGYRPGRYHGNHCLQDVALATREAAAFKADGGGAIVELTTGGIVPDPEGLAAIARGAGIHVVLGAGFYTENFLDAETLALSTEALTEITLGQLTEGAWGTKVRCGLIGEIGCSWPLTPFERRSLKSGARAQIATGAAITIHPGRDRAAPDEILDVLEAEGADLSRVVIGHMDRTLLDDADVVALARRGSIVEYDFFGIEHSNYWLGVVDIPNDWMRIRALRKLFDAGLGDRVVISHDICTRTRLQSLGGHGYGHILRNVVPLMRDRGFSQSEIDLLLLETPRRILTIGG

SEQ ID NO: 815 - protein, 349 aa, Artificial Sequence
  Synthetic
MAAAETGTGHARIETVLGPIAPAALGATLMHEHLLCDLTPPARRGQGLPEPEITLETIFDMGYRPGRYHGNHHLQDVALATREAAAFKADGGGAIVELTTGGIVPDPEGLAAIARGAGIHVVLGAGFYTENFLDAETLALSTEALTEITLGQLTEGAWGTKVRCGLIGEIGCSWPLTPFERRSLKSGARAQIATGAAITIHPGRDRAAPDEILDVLEAEGADLSRVVIGHMDRTLLDDADVVALARRGSIVEYDFFGIEHSNYWLGVVDIPNDWMRIRALRKLFDAGLGDRVVISHDICTRTRLQSLGGHGYGHILRNVVPLMRDRGFSQSEIDLLLLETPRRILTIGG

SEQ ID NO: 816 - protein, 349 aa, Artificial Sequence
  Synthetic
MAAAETGTGHARIETVLGPIAPAALGATLMHEHLLCDLTPPARRGQGLPEPEITLETIFDMGYRPGRYHGNHILQDVALATREAAAFKADGGGAIVELTTGGIVPDPEGLAAIARGAGIHVVLGAGFYTENFLDAETLALSTEALTEITLGQLTEGAWGTKVRCGLIGEIGCSWPLTPFERRSLKSGARAQIATGAAITIHPGRDRAAPDEILDVLEAEGADLSRVVIGHMDRTLLDDADVVALARRGSIVEYDFFGIEHSNYWLGVVDIPNDWMRIRALRKLFDAGLGDRVVISHDICTRTRLQSLGGHGYGHILRNVVPLMRDRGFSQSEIDLLLLETPRRILTIGG

SEQ ID NO: 817 - protein, 349 aa, Artificial Sequence
  Synthetic
MAAAETGTGHARIETVLGPIAPAALGATLMHEHLLCDLTPPARRGQGLPEPEITLETIFDMGYRPGRYHGNHKLQDVALATREAAAFKADGGGAIVELTTGGIVPDPEGLAAIARGAGIHVVLGAGFYTENFLDAETLALSTEALTEITLGQLTEGAWGTKVRCGLIGEIGCSWPLTPFERRSLKSGARAQIATGAAITIHPGRDRAAPDEILDVLEAEGADLSRVVIGHMDRTLLDDADVVALARRGSIVEYDFFGIEHSNYWLGVVDIPNDWMRIRALRKLFDAGLGDRVVISHDICTRTRLQSLGGHGYGHILRNVVPLMRDRGFSQSEIDLLLLETPRRILTIGG

SEQ ID NO: 818 - protein, 349 aa, Artificial Sequence
  Synthetic
MAAAETGTGHARIETVLGPIAPAALGATLMHEHLLCDLTPPARRGQGLPEPEITLETIFDMGYRPGRYHGNHMLQDVALATREAAAFKADGGGAIVELTTGGIVPDPEGLAAIARGAGIHVVLGAGFYTENFLDAETLALSTEALTEITLGQLTEGAWGTKVRCGLIGEIGCSWPLTPFERRSLKSGARAQIATGAAITIHPGRDRAAPDEILDVLEAEGADLSRVVIGHMDRTLLDDADVVALARRGSIVEYDFFGIEHSNYWLGVVDIPNDWMRIRALRKLFDAGLGDRVVISHDICTRTRLQSLGGHGYGHILRNVVPLMRDRGFSQSEIDLLLLETPRRILTIGG

SEQ ID NO: 819 - protein, 349 aa, Artificial Sequence
  Synthetic
MAAAETGTGHARIETVLGPIAPAALGATLMHEHLLCDLTPPARRGQGLPEPEITLETIFDMGYRPGRYHGNHNLQDVALATREAAAFKADGGGAIVELTTGGIVPDPEGLAAIARGAGIHVVLGAGFYTENFLDAETLALSTEALTEITLGQLTEGAWGTKVRCGLIGEIGCSWPLTPFERRSLKSGARAQIATGAAITIHPGRDRAAPDEILDVLEAEGADLSRVVIGHMDRTLLDDADVVALARRGSIVEYDFFGIEHSNYWLGVVDIPNDWMRIRALRKLFDAGLGDRVVISHDICTRTRLQSLGGHGYGHILRNVVPLMRDRGFSQSEIDLLLLETPRRILTIGG

SEQ ID NO: 820 - protein, 349 aa, Artificial Sequence
  Synthetic
MAAAETGTGHARIETVLGPIAPAALGATLMHEHLLCDLTPPARRGQGLPEPEITLETIFDMGYRPGRYHGNHTLQDVALATREAAAFKADGGGAIVELTTGGIVPDPEGLAAIARGAGIHVVLGAGFYTENFLDAETLALSTEALTEITLGQLTEGAWGTKVRCGLIGEIGCSWPLTPFERRSLKSGARAQIATGAAITIHPGRDRAAPDEILDVLEAEGADLSRVVIGHMDRTLLDDADVVALARRGSIVEYDFFGIEHSNYWLGVVDIPNDWMRIRALRKLFDAGLGDRVVISHDICTRTRLQSLGGHGYGHILRNVVPLMRDRGFSQSEIDLLLLETPRRILTIGG

SEQ ID NO: 821 - protein, 349 aa, Artificial Sequence
  Synthetic
MAAAETGTGHARIETVLGPIAPAALGATLMHEHLLCDLTPPARRGQGLPEPEITLETIFDMGYRPGRYHGNHRFQDVALATREAAAFKADGGGAIVELTTGGIVPDPEGLAAIARGAGIHVVLGAGFYTENFLDAETLALSTEALTEITLGQLTEGAWGTKVRCGLIGEIGCSWPLTPFERRSLKSGARAQIATGAAITIHPGRDRAAPDEILDVLEAEGADLSRVVIGHMDRTLLDDADVVALARRGSIVEYDFFGIEHSNYWLGVVDIPNDWMRIRALRKLFDAGLGDRVVISHDICTRTRLQSLGGHGYGHILRNVVPLMRDRGFSQSEIDLLLLETPRRILTIGG

SEQ ID NO: 822 - protein, 349 aa, Artificial Sequence
  Synthetic
MAAAETGTGHARIETVLGPIAPAALGATLMHEHLLCDLTPPARRGQGLPEPEITLETIFDMGYRPGRYHGNHRHQDVALATREAAAFKADGGGAIVELTTGGIVPDPEGLAAIARGAGIHVVLGAGFYTENFLDAETLALSTEALTEITLGQLTEGAWGTKVRCGLIGEIGCSWPLTPFERRSLKSGARAQIATGAAITIHPGRDRAAPDEILDVLEAEGADLSRVVIGHMDRTLLDDADVVALARRGSIVEYDFFGIEHSNYWLGVVDIPNDWMRIRALRKLFDAGLGDRVVISHDICTRTRLQSLGGHGYGHILRNVVPLMRDRGFSQSEIDLLLLETPRRILTIGG

SEQ ID NO: 823 - protein, 349 aa, Artificial Sequence
  Synthetic
MAAAETGTGHARIETVLGPIAPAALGATLMHEHLLCDLTPPARRGQGLPEPEITLETIFDMGYRPGRYHGNHRIQDVALATREAAAFKADGGGAIVELTTGGIVPDPEGLAAIARGAGIHVVLGAGFYTENFLDAETLALSTEALTEITLGQLTEGAWGTKVRCGLIGEIGCSWPLTPFERRSLKSGARAQIATGAAITIHPGRDRAAPDEILDVLEAEGADLSRVVIGHMDRTLLDDADVVALARRGSIVEYDFFGIEHSNYWLGVVDIPNDWMRIRALRKLFDAGLGDRVVISHDICTRTRLQSLGGHGYGHILRNVVPLMRDRGFSQSEIDLLLLETPRRILTIGG

SEQ ID NO: 824 - protein, 349 aa, Artificial Sequence
  Synthetic
MAAAETGTGHARIETVLGPIAPAALGATLMHEHLLCDLTPPARRGQGLPEPEITLETIFDMGYRPGRYHGNHRMQDVALATREAAAFKADGGGAIVELTTGGIVPDPEGLAAIARGAGIHVVLGAGFYTENFLDAETLALSTEALTEITLGQLTEGAWGTKVRCGLIGEIGCSWPLTPFERRSLKSGARAQIATGAAITIHPGRDRAAPDEILDVLEAEGADLSRVVIGHMDRTLLDDADVVALARRGSIVEYDFFGIEHSNYWLGVVDIPNDWMRIRALRKLFDAGLGDRVVISHDICTRTRLQSLGGHGYGHILRNVVPLMRDRGFSQSEIDLLLLETPRRILTIGG

SEQ ID NO: 825 - protein, 349 aa, Artificial Sequence
  Synthetic
MAAAETGTGHARIETVLGPIAPAALGATLMHEHLLCDLTPPARRGQGLPEPEITLETIFDMGYRPGRYHGNHRWQDVALATREAAAFKADGGGAIVELTTGGIVPDPEGLAAIARGAGIHVVLGAGFYTENFLDAETLALSTEALTEITLGQLTEGAWGTKVRCGLIGEIGCSWPLTPFERRSLKSGARAQIATGAAITIHPGRDRAAPDEILDVLEAEGADLSRVVIGHMDRTLLDDADVVALARRGSIVEYDFFGIEHSNYWLGVVDIPNDWMRIRALRKLFDAGLGDRVVISHDICTRTRLQSLGGHGYGHILRNVVPLMRDRGFSQSEIDLLLLETPRRILTIGG

SEQ ID NO: 826 - protein, 349 aa, Artificial Sequence
  Synthetic
MAAAETGTGHARIETVLGPIAPAALGATLMHEHLLCDLTPPARRGQGLPEPEITLETIFDMGYRPGRYHGNHRLCDVALATREAAAFKADGGGAIVELTTGGIVPDPEGLAAIARGAGIHVVLGAGFYTENFLDAETLALSTEALTEITLGQLTEGAWGTKVRCGLIGEIGCSWPLTPFERRSLKSGARAQIATGAAITIHPGRDRAAPDEILDVLEAEGADLSRVVIGHMDRTLLDDADVVALARRGSIVEYDFFGIEHSNYWLGVVDIPNDWMRIRALRKLFDAGLGDRVVISHDICTRTRLQSLGGHGYGHILRNVVPLMRDRGFSQSEIDLLLLETPRRILTIGG

SEQ ID NO: 827 - protein, 349 aa, Artificial Sequence
  Synthetic
MAAAETGTGHARIETVLGPIAPAALGATLMHEHLLCDLTPPARRGQGLPEPEITLETIFDMGYRPGRYHGNHRLEDVALATREAAAFKADGGGAIVELTTGGIVPDPEGLAAIARGAGIHVVLGAGFYTENFLDAETLALSTEALTEITLGQLTEGAWGTKVRCGLIGEIGCSWPLTPFERRSLKSGARAQIATGAAITIHPGRDRAAPDEILDVLEAEGADLSRVVIGHMDRTLLDDADVVALARRGSIVEYDFFGIEHSNYWLGVVDIPNDWMRIRALRKLFDAGLGDRVVISHDICTRTRLQSLGGHGYGHILRNVVPLMRDRGFSQSEIDLLLLETPRRILTIGG

SEQ ID NO: 828 - protein, 349 aa, Artificial Sequence
  Synthetic
MAAAETGTGHARIETVLGPIAPAALGATLMHEHLLCDLTPPARRGQGLPEPEITLETIFDMGYRPGRYHGNHRLFDVALATREAAAFKADGGGAIVELTTGGIVPDPEGLAAIARGAGIHVVLGAGFYTENFLDAETLALSTEALTEITLGQLTEGAWGTKVRCGLIGEIGCSWPLTPFERRSLKSGARAQIATGAAITIHPGRDRAAPDEILDVLEAEGADLSRVVIGHMDRTLLDDADVVALARRGSIVEYDFFGIEHSNYWLGVVDIPNDWMRIRALRKLFDAGLGDRVVISHDICTRTRLQSLGGHGYGHILRNVVPLMRDRGFSQSEIDLLLLETPRRILTIGG

SEQ ID NO: 829 - protein, 349 aa, Artificial Sequence
  Synthetic
MAAAETGTGHARIETVLGPIAPAALGATLMHEHLLCDLTPPARRGQGLPEPEITLETIFDMGYRPGRYHGNHRLHDVALATREAAAFKADGGGAIVELTTGGIVPDPEGLAAIARGAGIHVVLGAGFYTENFLDAETLALSTEALTEITLGQLTEGAWGTKVRCGLIGEIGCSWPLTPFERRSLKSGARAQIATGAAITIHPGRDRAAPDEILDVLEAEGADLSRVVIGHMDRTLLDDADVVALARRGSIVEYDFFGIEHSNYWLGVVDIPNDWMRIRALRKLFDAGLGDRVVISHDICTRTRLQSLGGHGYGHILRNVVPLMRDRGFSQSEIDLLLLETPRRILTIGG

SEQ ID NO: 830 - protein, 349 aa, Artificial Sequence
  Synthetic
MAAAETGTGHARIETVLGPIAPAALGATLMHEHLLCDLTPPARRGQGLPEPEITLETIFDMGYRPGRYHGNHRLKDVALATREAAAFKADGGGAIVELTTGGIVPDPEGLAAIARGAGIHVVLGAGFYTENFLDAETLALSTEALTEITLGQLTEGAWGTKVRCGLIGEIGCSWPLTPFERRSLKSGARAQIATGAAITIHPGRDRAAPDEILDVLEAEGADLSRVVIGHMDRTLLDDADVVALARRGSIVEYDFFGIEHSNYWLGVVDIPNDWMRIRALRKLFDAGLGDRVVISHDICTRTRLQSLGGHGYGHILRNVVPLMRDRGFSQSEIDLLLLETPRRILTIGG

SEQ ID NO: 831 - protein, 349 aa, Artificial Sequence
  Synthetic
MAAAETGTGHARIETVLGPIAPAALGATLMHEHLLCDLTPPARRGQGLPEPEITLETIFDMGYRPGRYHGNHRLRDVALATREAAAFKADGGGAIVELTTGGIVPDPEGLAAIARGAGIHVVLGAGFYTENFLDAETLALSTEALTEITLGQLTEGAWGTKVRCGLIGEIGCSWPLTPFERRSLKSGARAQIATGAAITIHPGRDRAAPDEILDVLEAEGADLSRVVIGHMDRTLLDDADVVALARRGSIVEYDFFGIEHSNYWLGVVDIPNDWMRIRALRKLFDAGLGDRVVISHDICTRTRLQSLGGHGYGHILRNVVPLMRDRGFSQSEIDLLLLETPRRILTIGG

SEQ ID NO: 832 - protein, 349 aa, Artificial Sequence
  Synthetic
MAAAETGTGHARIETVLGPIAPAALGATLMHEHLLCDLTPPARRGQGLPEPEITLETIFDMGYRPGRYHGNHRLTDVALATREAAAFKADGGGAIVELTTGGIVPDPEGLAAIARGAGIHVVLGAGFYTENFLDAETLALSTEALTEITLGQLTEGAWGTKVRCGLIGEIGCSWPLTPFERRSLKSGARAQIATGAAITIHPGRDRAAPDEILDVLEAEGADLSRVVIGHMDRTLLDDADVVALARRGSIVEYDFFGIEHSNYWLGVVDIPNDWMRIRALRKLFDAGLGDRVVISHDICTRTRLQSLGGHGYGHILRNVVPLMRDRGFSQSEIDLLLLETPRRILTIGG

SEQ ID NO: 833 - protein, 349 aa, Artificial Sequence
  Synthetic
MAAAETGTGHARIETVLGPIAPAALGATLMHEHLLCDLTPPARRGQGLPEPEITLETIFDMGYRPGRYHGNHRLQDVALATREAAAFKADGGGALVELTTGGIVPDPEGLAAIARGAGIHVVLGAGFYTENFLDAETLALSTEALTEITLGQLTEGAWGTKVRCGLIGEIGCSWPLTPFERRSLKSGARAQIATGAAITIHPGRDRAAPDEILDVLEAEGADLSRVVIGHMDRTLLDDADVVALARRGSIVEYDFFGIEHSNYWLGVVDIPNDWMRIRALRKLFDAGLGDRVVISHDICTRTRLQSLGGHGYGHILRNVVPLMRDRGFSQSEIDLLLLETPRRILTIGG

SEQ ID NO: 834 - protein, 349 aa, Artificial Sequence
  Synthetic
MAAAETGTGHARIETVLGPIAPAALGATLMHEHLLCDLTPPARRGQGLPEPEITLETIFDMGYRPGRYHGNHRLQDVALATREAAAFKADGGGAMVELTTGGIVPDPEGLAAIARGAGIHVVLGAGFYTENFLDAETLALSTEALTEITLGQLTEGAWGTKVRCGLIGEIGCSWPLTPFERRSLKSGARAQIATGAAITIHPGRDRAAPDEILDVLEAEGADLSRVVIGHMDRTLLDDADVVALARRGSIVEYDFFGIEHSNYWLGVVDIPNDWMRIRALRKLFDAGLGDRVVISHDICTRTRLQSLGGHGYGHILRNVVPLMRDRGFSQSEIDLLLLETPRRILTIGG

SEQ ID NO: 835 - protein, 349 aa, Artificial Sequence
  Synthetic
MAAAETGTGHARIETVLGPIAPAALGATLMHEHLLCDLTPPARRGQGLPEPEITLETIFDMGYRPGRYHGNHRLQDVALATREAAAFKADGGGAVVELTTGGIVPDPEGLAAIARGAGIHVVLGAGFYTENFLDAETLALSTEALTEITLGQLTEGAWGTKVRCGLIGEIGCSWPLTPFERRSLKSGARAQIATGAAITIHPGRDRAAPDEILDVLEAEGADLSRVVIGHMDRTLLDDADVVALARRGSIVEYDFFGIEHSNYWLGVVDIPNDWMRIRALRKLFDAGLGDRVVISHDICTRTRLQSLGGHGYGHILRNVVPLMRDRGFSQSEIDLLLLETPRRILTIGG

SEQ ID NO: 836 - protein, 349 aa, Artificial Sequence
  Synthetic
MAAAETGTGHARIETVLGPIAPAALGATLMHEHLLCDLTPPARRGQGLPEPEITLETIFDMGYRPGRYHGNHRLQDVALATREAAAFKADGGGAICELTTGGIVPDPEGLAAIARGAGIHVVLGAGFYTENFLDAETLALSTEALTEITLGQLTEGAWGTKVRCGLIGEIGCSWPLTPFERRSLKSGARAQIATGAAITIHPGRDRAAPDEILDVLEAEGADLSRVVIGHMDRTLLDDADVVALARRGSIVEYDFFGIEHSNYWLGVVDIPNDWMRIRALRKLFDAGLGDRVVISHDICTRTRLQSLGGHGYGHILRNVVPLMRDRGFSQSEIDLLLLETPRRILTIGG

SEQ ID NO: 837 - protein, 349 aa, Artificial Sequence
  Synthetic
MAAAETGTGHARIETVLGPIAPAALGATLMHEHLLCDLTPPARRGQGLPEPEITLETIFDMGYRPGRYHGNHRLQDVALATREAAAFKADGGGAIIELTTGGIVPDPEGLAAIARGAGIHVVLGAGFYTENFLDAETLALSTEALTEITLGQLTEGAWGTKVRCGLIGEIGCSWPLTPFERRSLKSGARAQIATGAAITIHPGRDRAAPDEILDVLEAEGADLSRVVIGHMDRTLLDDADVVALARRGSIVEYDFFGIEHSNYWLGVVDIPNDWMRIRALRKLFDAGLGDRVVISHDICTRTRLQSLGGHGYGHILRNVVPLMRDRGFSQSEIDLLLLETPRRILTIGG

SEQ ID NO: 838 - protein, 349 aa, Artificial Sequence
  Synthetic
MAAAETGTGHARIETVLGPIAPAALGATLMHEHLLCDLTPPARRGQGLPEPEITLETIFDMGYRPGRYHGNHRLQDVALATREAAAFKADGGGAITELTTGGIVPDPEGLAAIARGAGIHVVLGAGFYTENFLDAETLALSTEALTEITLGQLTEGAWGTKVRCGLIGEIGCSWPLTPFERRSLKSGARAQIATGAAITIHPGRDRAAPDEILDVLEAEGADLSRVVIGHMDRTLLDDADVVALARRGSIVEYDFFGIEHSNYWLGVVDIPNDWMRIRALRKLFDAGLGDRVVISHDICTRTRLQSLGGHGYGHILRNVVPLMRDRGFSQSEIDLLLLETPRRILTIGG

SEQ ID NO: 839 - protein, 349 aa, Artificial Sequence
  Synthetic
MAAAETGTGHARIETVLGPIAPAALGATLMHEHLLCDLTPPARRGQGLPEPEITLETIFDMGYRPGRYHGNHRLQDVALATREAAAFKADGGGAIVEATTGGIVPDPEGLAAIARGAGIHVVLGAGFYTENFLDAETLALSTEALTEITLGQLTEGAWGTKVRCGLIGEIGCSWPLTPFERRSLKSGARAQIATGAAITIHPGRDRAAPDEILDVLEAEGADLSRVVIGHMDRTLLDDADVVALARRGSIVEYDFFGIEHSNYWLGVVDIPNDWMRIRALRKLFDAGLGDRVVISHDICTRTRLQSLGGHGYGHILRNVVPLMRDRGFSQSEIDLLLLETPRRILTIGG

SEQ ID NO: 840 - protein, 349 aa, Artificial Sequence
  Synthetic
MAAAETGTGHARIETVLGPIAPAALGATLMHEHLLCDLTPPARRGQGLPEPEITLETIFDMGYRPGRYHGNHRLQDVALATREAAAFKADGGGAIVECTTGGIVPDPEGLAAIARGAGIHVVLGAGFYTENFLDAETLALSTEALTEITLGQLTEGAWGTKVRCGLIGEIGCSWPLTPFERRSLKSGARAQIATGAAITIHPGRDRAAPDEILDVLEAEGADLSRVVIGHMDRTLLDDADVVALARRGSIVEYDFFGIEHSNYWLGVVDIPNDWMRIRALRKLFDAGLGDRVVISHDICTRTRLQSLGGHGYGHILRNVVPLMRDRGFSQSEIDLLLLETPRRILTIGG

SEQ ID NO: 841 - protein, 349 aa, Artificial Sequence
  Synthetic
MAAAETGTGHARIETVLGPIAPAALGATLMHEHLLCDLTPPARRGQGLPEPEITLETIFDMGYRPGRYHGNHRLQDVALATREAAAFKADGGGAIVEITTGGIVPDPEGLAAIARGAGIHVVLGAGFYTENFLDAETLALSTEALTEITLGQLTEGAWGTKVRCGLIGEIGCSWPLTPFERRSLKSGARAQIATGAAITIHPGRDRAAPDEILDVLEAEGADLSRVVIGHMDRTLLDDADVVALARRGSIVEYDFFGIEHSNYWLGVVDIPNDWMRIRALRKLFDAGLGDRVVISHDICTRTRLQSLGGHGYGHILRNVVPLMRDRGFSQSEIDLLLLETPRRILTIGG

SEQ ID NO: 842 - protein, 349 aa, Artificial Sequence
  Synthetic
MAAAETGTGHARIETVLGPIAPAALGATLMHEHLLCDLTPPARRGQGLPEPEITLETIFDMGYRPGRYHGNHRLQDVALATREAAAFKADGGGAIVEMTTGGIVPDPEGLAAIARGAGIHVVLGAGFYTENFLDAETLALSTEALTEITLGQLTEGAWGTKVRCGLIGEIGCSWPLTPFERRSLKSGARAQIATGAAITIHPGRDRAAPDEILDVLEAEGADLSRVVIGHMDRTLLDDADVVALARRGSIVEYDFFGIEHSNYWLGVVDIPNDWMRIRALRKLFDAGLGDRVVISHDICTRTRLQSLGGHGYGHILRNVVPLMRDRGFSQSEIDLLLLETPRRILTIGG

SEQ ID NO: 843 - protein, 349 aa, Artificial Sequence
  Synthetic
MAAAETGTGHARIETVLGPIAPAALGATLMHEHLLCDLTPPARRGQGLPEPEITLETIFDMGYRPGRYHGNHRLQDVALATREAAAFKADGGGAIVETTTGGIVPDPEGLAAIARGAGIHVVLGAGFYTENFLDAETLALSTEALTEITLGQLTEGAWGTKVRCGLIGEIGCSWPLTPFERRSLKSGARAQIATGAAITIHPGRDRAAPDEILDVLEAEGADLSRVVIGHMDRTLLDDADVVALARRGSIVEYDFFGIEHSNYWLGVVDIPNDWMRIRALRKLFDAGLGDRVVISHDICTRTRLQSLGGHGYGHILRNVVPLMRDRGFSQSEIDLLLLETPRRILTIGG

SEQ ID NO: 844 - protein, 349 aa, Artificial Sequence
  Synthetic
MAAAETGTGHARIETVLGPIAPAALGATLMHEHLLCDLTPPARRGQGLPEPEITLETIFDMGYRPGRYHGNHRLQDVALATREAAAFKADGGGAIVEVTTGGIVPDPEGLAAIARGAGIHVVLGAGFYTENFLDAETLALSTEALTEITLGQLTEGAWGTKVRCGLIGEIGCSWPLTPFERRSLKSGARAQIATGAAITIHPGRDRAAPDEILDVLEAEGADLSRVVIGHMDRTLLDDADVVALARRGSIVEYDFFGIEHSNYWLGVVDIPNDWMRIRALRKLFDAGLGDRVVISHDICTRTRLQSLGGHGYGHILRNVVPLMRDRGFSQSEIDLLLLETPRRILTIGG

SEQ ID NO: 845 - protein, 349 aa, Artificial Sequence
  Synthetic
MAAAETGTGHARIETVLGPIAPAALGATLMHEHLLCDLTPPARRGQGLPEPEITLETIFDMGYRPGRYHGNHRLQDVALATREAAAFKADGGGAIVELNTGGIVPDPEGLAAIARGAGIHVVLGAGFYTENFLDAETLALSTEALTEITLGQLTEGAWGTKVRCGLIGEIGCSWPLTPFERRSLKSGARAQIATGAAITIHPGRDRAAPDEILDVLEAEGADLSRVVIGHMDRTLLDDADVVALARRGSIVEYDFFGIEHSNYWLGVVDIPNDWMRIRALRKLFDAGLGDRVVISHDICTRTRLQSLGGHGYGHILRNVVPLMRDRGFSQSEIDLLLLETPRRILTIGG

SEQ ID NO: 846 - protein, 349 aa, Artificial Sequence
  Synthetic
MAAAETGTGHARIETVLGPIAPAALGATLMHEHLLCDLTPPARRGQGLPEPEITLETIFDMGYRPGRYHGNHRLQDVALATREAAAFKADGGGAIVELSTGGIVPDPEGLAAIARGAGIHVVLGAGFYTENFLDAETLALSTEALTEITLGQLTEGAWGTKVRCGLIGEIGCSWPLTPFERRSLKSGARAQIATGAAITIHPGRDRAAPDEILDVLEAEGADLSRVVIGHMDRTLLDDADVVALARRGSIVEYDFFGIEHSNYWLGVVDIPNDWMRIRALRKLFDAGLGDRVVISHDICTRTRLQSLGGHGYGHILRNVVPLMRDRGFSQSEIDLLLLETPRRILTIGG

SEQ ID NO: 847 - protein, 349 aa, Artificial Sequence
  Synthetic
MAAAETGTGHARIETVLGPIAPAALGATLMHEHLLCDLTPPARRGQGLPEPEITLETIFDMGYRPGRYHGNHRLQDVALATREAAAFKADGGGAIVELTCGGIVPDPEGLAAIARGAGIHVVLGAGFYTENFLDAETLALSTEALTEITLGQLTEGAWGTKVRCGLIGEIGCSWPLTPFERRSLKSGARAQIATGAAITIHPGRDRAAPDEILDVLEAEGADLSRVVIGHMDRTLLDDADVVALARRGSIVEYDFFGIEHSNYWLGVVDIPNDWMRIRALRKLFDAGLGDRVVISHDICTRTRLQSLGGHGYGHILRNVVPLMRDRGFSQSEIDLLLLETPRRILTIGG

SEQ ID NO: 848 - protein, 349 aa, Artificial Sequence
  Synthetic
MAAAETGTGHARIETVLGPIAPAALGATLMHEHLLCDLTPPARRGQGLPEPEITLETIFDMGYRPGRYHGNHRLQDVALATREAAAFKADGGGAIVELTNGGIVPDPEGLAAIARGAGIHVVLGAGFYTENFLDAETLALSTEALTEITLGQLTEGAWGTKVRCGLIGEIGCSWPLTPFERRSLKSGARAQIATGAAITIHPGRDRAAPDEILDVLEAEGADLSRVVIGHMDRTLLDDADVVALARRGSIVEYDFFGIEHSNYWLGVVDIPNDWMRIRALRKLFDAGLGDRVVISHDICTRTRLQSLGGHGYGHILRNVVPLMRDRGFSQSEIDLLLLETPRRILTIGG

SEQ ID NO: 849 - protein, 349 aa, Artificial Sequence
  Synthetic
MAAAETGTGHARIETVLGPIAPAALGATLMHEHLLCDLTPPARRGQGLPEPEITLETIFDMGYRPGRYHGNHRLQDVALATREAAAFKADGGGAIVELTSGGIVPDPEGLAAIARGAGIHVVLGAGFYTENFLDAETLALSTEALTEITLGQLTEGAWGTKVRCGLIGEIGCSWPLTPFERRSLKSGARAQIATGAAITIHPGRDRAAPDEILDVLEAEGADLSRVVIGHMDRTLLDDADVVALARRGSIVEYDFFGIEHSNYWLGVVDIPNDWMRIRALRKLFDAGLGDRVVISHDICTRTRLQSLGGHGYGHILRNVVPLMRDRGFSQSEIDLLLLETPRRILTIGG

SEQ ID NO: 850 - protein, 349 aa, Artificial Sequence
  Synthetic
MAAAETGTGHARIETVLGPIAPAALGATLMHEHLLCDLTPPARRGQGLPEPEITLETIFDMGYRPGRYHGNHRLQDVALATREAAAFKADGGGAIVELTVGGIVPDPEGLAAIARGAGIHVVLGAGFYTENFLDAETLALSTEALTEITLGQLTEGAWGTKVRCGLIGEIGCSWPLTPFERRSLKSGARAQIATGAAITIHPGRDRAAPDEILDVLEAEGADLSRVVIGHMDRTLLDDADVVALARRGSIVEYDFFGIEHSNYWLGVVDIPNDWMRIRALRKLFDAGLGDRVVISHDICTRTRLQSLGGHGYGHILRNVVPLMRDRGFSQSEIDLLLLETPRRILTIGG

SEQ ID NO: 851 - protein, 349 aa, Artificial Sequence
  Synthetic
MAAAETGTGHARIETVLGPIAPAALGATLMHEHLLCDLTPPARRGQGLPEPEITLETIFDMGYRPGRYHGNHRLQDVALATREAAAFKADGGGAIVELTTGGCVPDPEGLAAIARGAGIHVVLGAGFYTENFLDAETLALSTEALTEITLGQLTEGAWGTKVRCGLIGEIGCSWPLTPFERRSLKSGARAQIATGAAITIHPGRDRAAPDEILDVLEAEGADLSRVVIGHMDRTLLDDADVVALARRGSIVEYDFFGIEHSNYWLGVVDIPNDWMRIRALRKLFDAGLGDRVVISHDICTRTRLQSLGGHGYGHILRNVVPLMRDRGFSQSEIDLLLLETPRRILTIGG

SEQ ID NO: 852 - protein, 349 aa, Artificial Sequence
  Synthetic
MAAAETGTGHARIETVLGPIAPAALGATLMHEHLLCDLTPPARRGQGLPEPEITLETIFDMGYRPGRYHGNHRLQDVALATREAAAFKADGGGAIVELTTGGMVPDPEGLAAIARGAGIHVVLGAGFYTENFLDAETLALSTEALTEITLGQLTEGAWGTKVRCGLIGEIGCSWPLTPFERRSLKSGARAQIATGAAITIHPGRDRAAPDEILDVLEAEGADLSRVVIGHMDRTLLDDADVVALARRGSIVEYDFFGIEHSNYWLGVVDIPNDWMRIRALRKLFDAGLGDRVVISHDICTRTRLQSLGGHGYGHILRNVVPLMRDRGFSQSEIDLLLLETPRRILTIGG

SEQ ID NO: 853 - protein, 349 aa, Artificial Sequence
  Synthetic
MAAAETGTGHARIETVLGPIAPAALGATLMHEHLLCDLTPPARRGQGLPEPEITLETIFDMGYRPGRYHGNHRLQDVALATREAAAFKADGGGAIVELTTGGIGPDPEGLAAIARGAGIHVVLGAGFYTENFLDAETLALSTEALTEITLGQLTEGAWGTKVRCGLIGEIGCSWPLTPFERRSLKSGARAQIATGAAITIHPGRDRAAPDEILDVLEAEGADLSRVVIGHMDRTLLDDADVVALARRGSIVEYDFFGIEHSNYWLGVVDIPNDWMRIRALRKLFDAGLGDRVVISHDICTRTRLQSLGGHGYGHILRNVVPLMRDRGFSQSEIDLLLLETPRRILTIGG

SEQ ID NO: 854 - protein, 349 aa, Artificial Sequence
  Synthetic
MAAAETGTGHARIETVLGPIAPAALGATLMHEHLLCDLTPPARRGQGLPEPEITLETIFDMGYRPGRYHGNHRLQDVALATREAAAFKADGGGAIVELTTGGIRPDPEGLAAIARGAGIHVVLGAGFYTENFLDAETLALSTEALTEITLGQLTEGAWGTKVRCGLIGEIGCSWPLTPFERRSLKSGARAQIATGAAITIHPGRDRAAPDEILDVLEAEGADLSRVVIGHMDRTLLDDADVVALARRGSIVEYDFFGIEHSNYWLGVVDIPNDWMRIRALRKLFDAGLGDRVVISHDICTRTRLQSLGGHGYGHILRNVVPLMRDRGFSQSEIDLLLLETPRRILTIGG

SEQ ID NO: 855 - protein, 349 aa, Artificial Sequence
  Synthetic
MAAAETGTGHARIETVLGPIAPAALGATLMHEHLLCDLTPPARRGQGLPEPEITLETIFDMGYRPGRYHGNHRLQDVALATREAAAFKADGGGAIVELTTGGIVPNPEGLAAIARGAGIHVVLGAGFYTENFLDAETLALSTEALTEITLGQLTEGAWGTKVRCGLIGEIGCSWPLTPFERRSLKSGARAQIATGAAITIHPGRDRAAPDEILDVLEAEGADLSRVVIGHMDRTLLDDADVVALARRGSIVEYDFFGIEHSNYWLGVVDIPNDWMRIRALRKLFDAGLGDRVVISHDICTRTRLQSLGGHGYGHILRNVVPLMRDRGFSQSEIDLLLLETPRRILTIGG

SEQ ID NO: 856 - protein, 349 aa, Artificial Sequence
  Synthetic
MAAAETGTGHARIETVLGPIAPAALGATLMHEHLLCDLTPPARRGQGLPEPEITLETIFDMGYRPGRYHGNHRLQDVALATREAAAFKADGGGAIVELTTGGIVPDPEGIAAIARGAGIHVVLGAGFYTENFLDAETLALSTEALTEITLGQLTEGAWGTKVRCGLIGEIGCSWPLTPFERRSLKSGARAQIATGAAITIHPGRDRAAPDEILDVLEAEGADLSRVVIGHMDRTLLDDADVVALARRGSIVEYDFFGIEHSNYWLGVVDIPNDWMRIRALRKLFDAGLGDRVVISHDICTRTRLQSLGGHGYGHILRNVVPLMRDRGFSQSEIDLLLLETPRRILTIGG

SEQ ID NO: 857 - protein, 349 aa, Artificial Sequence
  Synthetic
MAAAETGTGHARIETVLGPIAPAALGATLMHEHLLCDLTPPARRGQGLPEPEITLETIFDMGYRPGRYHGNHRLQDVALATREAAAFKADGGGAIVELTTGGIVPDPEGLAAIARGAGIHVVLGAGHYTENFLDAETLALSTEALTEITLGQLTEGAWGTKVRCGLIGEIGCSWPLTPFERRSLKSGARAQIATGAAITIHPGRDRAAPDEILDVLEAEGADLSRVVIGHMDRTLLDDADVVALARRGSIVEYDFFGIEHSNYWLGVVDIPNDWMRIRALRKLFDAGLGDRVVISHDICTRTRLQSLGGHGYGHILRNVVPLMRDRGFSQSEIDLLLLETPRRILTIGG

SEQ ID NO: 858 - protein, 349 aa, Artificial Sequence
  Synthetic
MAAAETGTGHARIETVLGPIAPAALGATLMHEHLLCDLTPPARRGQGLPEPEITLETIFDMGYRPGRYHGNHRLQDVALATREAAAFKADGGGAIVELTTGGIVPDPEGLAAIARGAGIHVVLGAGLYTENFLDAETLALSTEALTEITLGQLTEGAWGTKVRCGLIGEIGCSWPLTPFERRSLKSGARAQIATGAAITIHPGRDRAAPDEILDVLEAEGADLSRVVIGHMDRTLLDDADVVALARRGSIVEYDFFGIEHSNYWLGVVDIPNDWMRIRALRKLFDAGLGDRVVISHDICTRTRLQSLGGHGYGHILRNVVPLMRDRGFSQSEIDLLLLETPRRILTIGG

SEQ ID NO: 859 - protein, 349 aa, Artificial Sequence
  Synthetic
MAAAETGTGHARIETVLGPIAPAALGATLMHEHLLCDLTPPARRGQGLPEPEITLETIFDMGYRPGRYHGNHRLQDVALATREAAAFKADGGGAIVELTTGGIVPDPEGLAAIARGAGIHVVLGAGYYTENFLDAETLALSTEALTEITLGQLTEGAWGTKVRCGLIGEIGCSWPLTPFERRSLKSGARAQIATGAAITIHPGRDRAAPDEILDVLEAEGADLSRVVIGHMDRTLLDDADVVALARRGSIVEYDFFGIEHSNYWLGVVDIPNDWMRIRALRKLFDAGLGDRVVISHDICTRTRLQSLGGHGYGHILRNVVPLMRDRGFSQSEIDLLLLETPRRILTIGG

SEQ ID NO: 860 - protein, 349 aa, Artificial Sequence
  Synthetic
MAAAETGTGHARIETVLGPIAPAALGATLMHEHLLCDLTPPARRGQGLPEPEITLETIFDMGYRPGRYHGNHRLQDVALATREAAAFKADGGGAIVELTTGGIVPDPEGLAAIARGAGIHVVLGAGFHTENFLDAETLALSTEALTEITLGQLTEGAWGTKVRCGLIGEIGCSWPLTPFERRSLKSGARAQIATGAAITIHPGRDRAAPDEILDVLEAEGADLSRVVIGHMDRTLLDDADVVALARRGSIVEYDFFGIEHSNYWLGVVDIPNDWMRIRALRKLFDAGLGDRVVISHDICTRTRLQSLGGHGYGHILRNVVPLMRDRGFSQSEIDLLLLETPRRILTIGG

SEQ ID NO: 861 - protein, 349 aa, Artificial Sequence
  Synthetic
MAAAETGTGHARIETVLGPIAPAALGATLMHEHLLCDLTPPARRGQGLPEPEITLETIFDMGYRPGRYHGNHRLQDVALATREAAAFKADGGGAIVELTTGGIVPDPEGLAAIARGAGIHVVLGAGFYGENFLDAETLALSTEALTEITLGQLTEGAWGTKVRCGLIGEIGCSWPLTPFERRSLKSGARAQIATGAAITIHPGRDRAAPDEILDVLEAEGADLSRVVIGHMDRTLLDDADVVALARRGSIVEYDFFGIEHSNYWLGVVDIPNDWMRIRALRKLFDAGLGDRVVISHDICTRTRLQSLGGHGYGHILRNVVPLMRDRGFSQSEIDLLLLETPRRILTIGG

SEQ ID NO: 862 - protein, 349 aa, Artificial Sequence
  Synthetic
MAAAETGTGHARIETVLGPIAPAALGATLMHEHLLCDLTPPARRGQGLPEPEITLETIFDMGYRPGRYHGNHRLQDVALATREAAAFKADGGGAIVELTTGGIVPDPEGLAAIARGAGIHVVLGAGFYKENFLDAETLALSTEALTEITLGQLTEGAWGTKVRCGLIGEIGCSWPLTPFERRSLKSGARAQIATGAAITIHPGRDRAAPDEILDVLEAEGADLSRVVIGHMDRTLLDDADVVALARRGSIVEYDFFGIEHSNYWLGVVDIPNDWMRIRALRKLFDAGLGDRVVISHDICTRTRLQSLGGHGYGHILRNVVPLMRDRGFSQSEIDLLLLETPRRILTIGG

SEQ ID NO: 863 - protein, 349 aa, Artificial Sequence
  Synthetic
MAAAETGTGHARIETVLGPIAPAALGATLMHEHLLCDLTPPARRGQGLPEPEITLETIFDMGYRPGRYHGNHRLQDVALATREAAAFKADGGGAIVELTTGGIVPDPEGLAAIARGAGIHVVLGAGFYMENFLDAETLALSTEALTEITLGQLTEGAWGTKVRCGLIGEIGCSWPLTPFERRSLKSGARAQIATGAAITIHPGRDRAAPDEILDVLEAEGADLSRVVIGHMDRTLLDDADVVALARRGSIVEYDFFGIEHSNYWLGVVDIPNDWMRIRALRKLFDAGLGDRVVISHDICTRTRLQSLGGHGYGHILRNVVPLMRDRGFSQSEIDLLLLETPRRILTIGG

SEQ ID NO: 864 - protein, 349 aa, Artificial Sequence
  Synthetic
MAAAETGTGHARIETVLGPIAPAALGATLMHEHLLCDLTPPARRGQGLPEPEITLETIFDMGYRPGRYHGNHRLQDVALATREAAAFKADGGGAIVELTTGGIVPDPEGLAAIARGAGIHVVLGAGFYVENFLDAETLALSTEALTEITLGQLTEGAWGTKVRCGLIGEIGCSWPLTPFERRSLKSGARAQIATGAAITIHPGRDRAAPDEILDVLEAEGADLSRVVIGHMDRTLLDDADVVALARRGSIVEYDFFGIEHSNYWLGVVDIPNDWMRIRALRKLFDAGLGDRVVISHDICTRTRLQSLGGHGYGHILRNVVPLMRDRGFSQSEIDLLLLETPRRILTIGG

SEQ ID NO: 865 - protein, 349 aa, Artificial Sequence
  Synthetic
MAAAETGTGHARIETVLGPIAPAALGATLMHEHLLCDLTPPARRGQGLPEPEITLETIFDMGYRPGRYHGNHRLQDVALATREAAAFKADGGGAIVELTTGGIVPDPEGLAAIARGAGIHVVLGAGFYYENFLDAETLALSTEALTEITLGQLTEGAWGTKVRCGLIGEIGCSWPLTPFERRSLKSGARAQIATGAAITIHPGRDRAAPDEILDVLEAEGADLSRVVIGHMDRTLLDDADVVALARRGSIVEYDFFGIEHSNYWLGVVDIPNDWMRIRALRKLFDAGLGDRVVISHDICTRTRLQSLGGHGYGHILRNVVPLMRDRGFSQSEIDLLLLETPRRILTIGG

SEQ ID NO: 866 - protein, 349 aa, Artificial Sequence
  Synthetic
MAAAETGTGHARIETVLGPIAPAALGATLMHEHLLCDLTPPARRGQGLPEPEITLETIFDMGYRPGRYHGNHRLQDVALATREAAAFKADGGGAIVELTTGGIVPDPEGLAAIARGAGIHVVLGAGFYTENFLDAETLALSTEALTEITLGQLTEGAWGTKVRCGLIGAIGCSWPLTPFERRSLKSGARAQIATGAAITIHPGRDRAAPDEILDVLEAEGADLSRVVIGHMDRTLLDDADVVALARRGSIVEYDFFGIEHSNYWLGVVDIPNDWMRIRALRKLFDAGLGDRVVISHDICTRTRLQSLGGHGYGHILRNVVPLMRDRGFSQSEIDLLLLETPRRILTIGG

SEQ ID NO: 867 - protein, 349 aa, Artificial Sequence
  Synthetic
MAAAETGTGHARIETVLGPIAPAALGATLMHEHLLCDLTPPARRGQGLPEPEITLETIFDMGYRPGRYHGNHRLQDVALATREAAAFKADGGGAIVELTTGGIVPDPEGLAAIARGAGIHVVLGAGFYTENFLDAETLALSTEALTEITLGQLTEGAWGTKVRCGLIGCIGCSWPLTPFERRSLKSGARAQIATGAAITIHPGRDRAAPDEILDVLEAEGADLSRVVIGHMDRTLLDDADVVALARRGSIVEYDFFGIEHSNYWLGVVDIPNDWMRIRALRKLFDAGLGDRVVISHDICTRTRLQSLGGHGYGHILRNVVPLMRDRGFSQSEIDLLLLETPRRILTIGG

SEQ ID NO: 868 - protein, 349 aa, Artificial Sequence
  Synthetic
MAAAETGTGHARIETVLGPIAPAALGATLMHEHLLCDLTPPARRGQGLPEPEITLETIFDMGYRPGRYHGNHRLQDVALATREAAAFKADGGGAIVELTTGGIVPDPEGLAAIARGAGIHVVLGAGFYTENFLDAETLALSTEALTEITLGQLTEGAWGTKVRCGLIGKIGCSWPLTPFERRSLKSGARAQIATGAAITIHPGRDRAAPDEILDVLEAEGADLSRVVIGHMDRTLLDDADVVALARRGSIVEYDFFGIEHSNYWLGVVDIPNDWMRIRALRKLFDAGLGDRVVISHDICTRTRLQSLGGHGYGHILRNVVPLMRDRGFSQSEIDLLLLETPRRILTIGG

SEQ ID NO: 869 - protein, 349 aa, Artificial Sequence
  Synthetic
MAAAETGTGHARIETVLGPIAPAALGATLMHEHLLCDLTPPARRGQGLPEPEITLETIFDMGYRPGRYHGNHRLQDVALATREAAAFKADGGGAIVELTTGGIVPDPEGLAAIARGAGIHVVLGAGFYTENFLDAETLALSTEALTEITLGQLTEGAWGTKVRCGLIGTIGCSWPLTPFERRSLKSGARAQIATGAAITIHPGRDRAAPDEILDVLEAEGADLSRVVIGHMDRTLLDDADVVALARRGSIVEYDFFGIEHSNYWLGVVDIPNDWMRIRALRKLFDAGLGDRVVISHDICTRTRLQSLGGHGYGHILRNVVPLMRDRGFSQSEIDLLLLETPRRILTIGG

SEQ ID NO: 870 - protein, 349 aa, Artificial Sequence
  Synthetic
MAAAETGTGHARIETVLGPIAPAALGATLMHEHLLCDLTPPARRGQGLPEPEITLETIFDMGYRPGRYHGNHRLQDVALATREAAAFKADGGGAIVELTTGGIVPDPEGLAAIARGAGIHVVLGAGFYTENFLDAETLALSTEALTEITLGQLTEGAWGTKVRCGLIGEIGCSWPLTPFERRSLKSGARAQIATGAAIAIHPGRDRAAPDEILDVLEAEGADLSRVVIGHMDRTLLDDADVVALARRGSIVEYDFFGIEHSNYWLGVVDIPNDWMRIRALRKLFDAGLGDRVVISHDICTRTRLQSLGGHGYGHILRNVVPLMRDRGFSQSEIDLLLLETPRRILTIGG

SEQ ID NO: 871 - protein, 349 aa, Artificial Sequence
  Synthetic
MAAAETGTGHARIETVLGPIAPAALGATLMHEHLLCDLTPPARRGQGLPEPEITLETIFDMGYRPGRYHGNHRLQDVALATREAAAFKADGGGAIVELTTGGIVPDPEGLAAIARGAGIHVVLGAGFYTENFLDAETLALSTEALTEITLGQLTEGAWGTKVRCGLIGEIGCSWPLTPFERRSLKSGARAQIATGAAIHIHPGRDRAAPDEILDVLEAEGADLSRVVIGHMDRTLLDDADVVALARRGSIVEYDFFGIEHSNYWLGVVDIPNDWMRIRALRKLFDAGLGDRVVISHDICTRTRLQSLGGHGYGHILRNVVPLMRDRGFSQSEIDLLLLETPRRILTIGG

SEQ ID NO: 872 - protein, 349 aa, Artificial Sequence
  Synthetic
MAAAETGTGHARIETVLGPIAPAALGATLMHEHLLCDLTPPARRGQGLPEPEITLETIFDMGYRPGRYHGNHRLQDVALATREAAAFKADGGGAIVELTTGGIVPDPEGLAAIARGAGIHVVLGAGFYTENFLDAETLALSTEALTEITLGQLTEGAWGTKVRCGLIGEIGCSWPLTPFERRSLKSGARAQIATGAAIIIHPGRDRAAPDEILDVLEAEGADLSRVVIGHMDRTLLDDADVVALARRGSIVEYDFFGIEHSNYWLGVVDIPNDWMRIRALRKLFDAGLGDRVVISHDICTRTRLQSLGGHGYGHILRNVVPLMRDRGFSQSEIDLLLLETPRRILTIGG

SEQ ID NO: 873 - protein, 349 aa, Artificial Sequence
  Synthetic
MAAAETGTGHARIETVLGPIAPAALGATLMHEHLLCDLTPPARRGQGLPEPEITLETIFDMGYRPGRYHGNHRLQDVALATREAAAFKADGGGAIVELTTGGIVPDPEGLAAIARGAGIHVVLGAGFYTENFLDAETLALSTEALTEITLGQLTEGAWGTKVRCGLIGEIGCSWPLTPFERRSLKSGARAQIATGAAIMIHPGRDRAAPDEILDVLEAEGADLSRVVIGHMDRTLLDDADVVALARRGSIVEYDFFGIEHSNYWLGVVDIPNDWMRIRALRKLFDAGLGDRVVISHDICTRTRLQSLGGHGYGHILRNVVPLMRDRGFSQSEIDLLLLETPRRILTIGG

SEQ ID NO: 874 - protein, 349 aa, Artificial Sequence
  Synthetic
MAAAETGTGHARIETVLGPIAPAALGATLMHEHLLCDLTPPARRGQGLPEPEITLETIFDMGYRPGRYHGNHRLQDVALATREAAAFKADGGGAIVELTTGGIVPDPEGLAAIARGAGIHVVLGAGFYTENFLDAETLALSTEALTEITLGQLTEGAWGTKVRCGLIGEIGCSWPLTPFERRSLKSGARAQIATGAAINIHPGRDRAAPDEILDVLEAEGADLSRVVIGHMDRTLLDDADVVALARRGSIVEYDFFGIEHSNYWLGVVDIPNDWMRIRALRKLFDAGLGDRVVISHDICTRTRLQSLGGHGYGHILRNVVPLMRDRGFSQSEIDLLLLETPRRILTIGG

SEQ ID NO: 875 - protein, 349 aa, Artificial Sequence
  Synthetic
MAAAETGTGHARIETVLGPIAPAALGATLMHEHLLCDLTPPARRGQGLPEPEITLETIFDMGYRPGRYHGNHRLQDVALATREAAAFKADGGGAIVELTTGGIVPDPEGLAAIARGAGIHVVLGAGFYTENFLDAETLALSTEALTEITLGQLTEGAWGTKVRCGLIGEIGCSWPLTPFERRSLKSGARAQIATGAAIQIHPGRDRAAPDEILDVLEAEGADLSRVVIGHMDRTLLDDADVVALARRGSIVEYDFFGIEHSNYWLGVVDIPNDWMRIRALRKLFDAGLGDRVVISHDICTRTRLQSLGGHGYGHILRNVVPLMRDRGFSQSEIDLLLLETPRRILTIGG

SEQ ID NO: 876 - protein, 349 aa, Artificial Sequence
  Synthetic
MAAAETGTGHARIETVLGPIAPAALGATLMHEHLLCDLTPPARRGQGLPEPEITLETIFDMGYRPGRYHGNHRLQDVALATREAAAFKADGGGAIVELTTGGIVPDPEGLAAIARGAGIHVVLGAGFYTENFLDAETLALSTEALTEITLGQLTEGAWGTKVRCGLIGEIGCSWPLTPFERRSLKSGARAQIATGAAISIHPGRDRAAPDEILDVLEAEGADLSRVVIGHMDRTLLDDADVVALARRGSIVEYDFFGIEHSNYWLGVVDIPNDWMRIRALRKLFDAGLGDRVVISHDICTRTRLQSLGGHGYGHILRNVVPLMRDRGFSQSEIDLLLLETPRRILTIGG

SEQ ID NO: 877 - protein, 349 aa, Artificial Sequence
  Synthetic
MAAAETGTGHARIETVLGPIAPAALGATLMHEHLLCDLTPPARRGQGLPEPEITLETIFDMGYRPGRYHGNHRLQDVALATREAAAFKADGGGAIVELTTGGIVPDPEGLAAIARGAGIHVVLGAGFYTENFLDAETLALSTEALTEITLGQLTEGAWGTKVRCGLIGEIGCSWPLTPFERRSLKSGARAQIATGAAIVIHPGRDRAAPDEILDVLEAEGADLSRVVIGHMDRTLLDDADVVALARRGSIVEYDFFGIEHSNYWLGVVDIPNDWMRIRALRKLFDAGLGDRVVISHDICTRTRLQSLGGHGYGHILRNVVPLMRDRGFSQSEIDLLLLETPRRILTIGG

SEQ ID NO: 878 - protein, 349 aa, Artificial Sequence
  Synthetic
MAAAETGTGHARIETVLGPIAPAALGATLMHEHLLCDLTPPARRGQGLPEPEITLETIFDMGYRPGRYHGNHRLQDVALATREAAAFKADGGGAIVELTTGGIVPDPEGLAAIARGAGIHVVLGAGFYTENFLDAETLALSTEALTEITLGQLTEGAWGTKVRCGLIGEIGCSWPLTPFERRSLKSGARAQIATGAAIWIHPGRDRAAPDEILDVLEAEGADLSRVVIGHMDRTLLDDADVVALARRGSIVEYDFFGIEHSNYWLGVVDIPNDWMRIRALRKLFDAGLGDRVVISHDICTRTRLQSLGGHGYGHILRNVVPLMRDRGFSQSEIDLLLLETPRRILTIGG

SEQ ID NO: 879 - protein, 349 aa, Artificial Sequence
  Synthetic
MAAAETGTGHARIETVLGPIAPAALGATLMHEHLLCDLTPPARRGQGLPEPEITLETIFDMGYRPGRYHGNHRLQDVALATREAAAFKADGGGAIVELTTGGIVPDPEGLAAIARGAGIHVVLGAGFYTENFLDAETLALSTEALTEITLGQLTEGAWGTKVRCGLIGEIGCSWPLTPFERRSLKSGARAQIATGAAIYIHPGRDRAAPDEILDVLEAEGADLSRVVIGHMDRTLLDDADVVALARRGSIVEYDFFGIEHSNYWLGVVDIPNDWMRIRALRKLFDAGLGDRVVISHDICTRTRLQSLGGHGYGHILRNVVPLMRDRGFSQSEIDLLLLETPRRILTIGG

SEQ ID NO: 880 - protein, 349 aa, Artificial Sequence
  Synthetic
MAAAETGTGHARIETVLGPIAPAALGATLMHEHLLCDLTPPARRGQGLPEPEITLETIFDMGYRPGRYHGNHRLQDVALATREAAAFKADGGGAIVELTTGGIVPDPEGLAAIARGAGIHVVLGAGFYTENFLDAETLALSTEALTEITLGQLTEGAWGTKVRCGLIGEIGCSWPLTPFERRSLKSGARAQIATGAAITCHPGRDRAAPDEILDVLEAEGADLSRVVIGHMDRTLLDDADVVALARRGSIVEYDFFGIEHSNYWLGVVDIPNDWMRIRALRKLFDAGLGDRVVISHDICTRTRLQSLGGHGYGHILRNVVPLMRDRGFSQSEIDLLLLETPRRILTIGG

SEQ ID NO: 881 - protein, 349 aa, Artificial Sequence
  Synthetic
MAAAETGTGHARIETVLGPIAPAALGATLMHEHLLCDLTPPARRGQGLPEPEITLETIFDMGYRPGRYHGNHRLQDVALATREAAAFKADGGGAIVELTTGGIVPDPEGLAAIARGAGIHVVLGAGFYTENFLDAETLALSTEALTEITLGQLTEGAWGTKVRCGLIGEIGCSWPLTPFERRSLKSGARAQIATGAAITVHPGRDRAAPDEILDVLEAEGADLSRVVIGHMDRTLLDDADVVALARRGSIVEYDFFGIEHSNYWLGVVDIPNDWMRIRALRKLFDAGLGDRVVISHDICTRTRLQSLGGHGYGHILRNVVPLMRDRGFSQSEIDLLLLETPRRILTIGG

SEQ ID NO: 882 - protein, 349 aa, Artificial Sequence
  Synthetic
MAAAETGTGHARIETVLGPIAPAALGATLMHEHLLCDLTPPARRGQGLPEPEITLETIFDMGYRPGRYHGNHRLQDVALATREAAAFKADGGGAIVELTTGGIVPDPEGLAAIARGAGIHVVLGAGFYTENFLDAETLALSTEALTEITLGQLTEGAWGTKVRCGLIGEIGCSWPLTPFERRSLKSGARAQIATGAAITICPGRDRAAPDEILDVLEAEGADLSRVVIGHMDRTLLDDADVVALARRGSIVEYDFFGIEHSNYWLGVVDIPNDWMRIRALRKLFDAGLGDRVVISHDICTRTRLQSLGGHGYGHILRNVVPLMRDRGFSQSEIDLLLLETPRRILTIGG

SEQ ID NO: 883 - protein, 349 aa, Artificial Sequence
  Synthetic
MAAAETGTGHARIETVLGPIAPAALGATLMHEHLLCDLTPPARRGQGLPEPEITLETIFDMGYRPGRYHGNHRLQDVALATREAAAFKADGGGAIVELTTGGIVPDPEGLAAIARGAGIHVVLGAGFYTENFLDAETLALSTEALTEITLGQLTEGAWGTKVRCGLIGEIGCSWPLTPFERRSLKSGARAQIATGAAITIRPGRDRAAPDEILDVLEAEGADLSRVVIGHMDRTLLDDADVVALARRGSIVEYDFFGIEHSNYWLGVVDIPNDWMRIRALRKLFDAGLGDRVVISHDICTRTRLQSLGGHGYGHILRNVVPLMRDRGFSQSEIDLLLLETPRRILTIGG

SEQ ID NO: 884 - protein, 349 aa, Artificial Sequence
  Synthetic
MAAAETGTGHARIETVLGPIAPAALGATLMHEHLLCDLTPPARRGQGLPEPEITLETIFDMGYRPGRYHGNHRLQDVALATREAAAFKADGGGAIVELTTGGIVPDPEGLAAIARGAGIHVVLGAGFYTENFLDAETLALSTEALTEITLGQLTEGAWGTKVRCGLIGEIGCSWPLTPFERRSLKSGARAQIATGAAITIHPGADRAAPDEILDVLEAEGADLSRVVIGHMDRTLLDDADVVALARRGSIVEYDFFGIEHSNYWLGVVDIPNDWMRIRALRKLFDAGLGDRVVISHDICTRTRLQSLGGHGYGHILRNVVPLMRDRGFSQSEIDLLLLETPRRILTIGG

SEQ ID NO: 885 - protein, 349 aa, Artificial Sequence
  Synthetic
MAAAETGTGHARIETVLGPIAPAALGATLMHEHLLCDLTPPARRGQGLPEPEITLETIFDMGYRPGRYHGNHRLQDVALATREAAAFKADGGGAIVELTTGGIVPDPEGLAAIARGAGIHVVLGAGFYTENFLDAETLALSTEALTEITLGQLTEGAWGTKVRCGLIGEIGCSWPLTPFERRSLKSGARAQIATGAAITIHPGCDRAAPDEILDVLEAEGADLSRVVIGHMDRTLLDDADVVALARRGSIVEYDFFGIEHSNYWLGVVDIPNDWMRIRALRKLFDAGLGDRVVISHDICTRTRLQSLGGHGYGHILRNVVPLMRDRGFSQSEIDLLLLETPRRILTIGG

SEQ ID NO: 886 - protein, 349 aa, Artificial Sequence
  Synthetic
MAAAETGTGHARIETVLGPIAPAALGATLMHEHLLCDLTPPARRGQGLPEPEITLETIFDMGYRPGRYHGNHRLQDVALATREAAAFKADGGGAIVELTTGGIVPDPEGLAAIARGAGIHVVLGAGFYTENFLDAETLALSTEALTEITLGQLTEGAWGTKVRCGLIGEIGCSWPLTPFERRSLKSGARAQIATGAAITIHPGEDRAAPDEILDVLEAEGADLSRVVIGHMDRTLLDDADVVALARRGSIVEYDFFGIEHSNYWLGVVDIPNDWMRIRALRKLFDAGLGDRVVISHDICTRTRLQSLGGHGYGHILRNVVPLMRDRGFSQSEIDLLLLETPRRILTIGG

SEQ ID NO: 887 - protein, 349 aa, Artificial Sequence
  Synthetic
MAAAETGTGHARIETVLGPIAPAALGATLMHEHLLCDLTPPARRGQGLPEPEITLETIFDMGYRPGRYHGNHRLQDVALATREAAAFKADGGGAIVELTTGGIVPDPEGLAAIARGAGIHVVLGAGFYTENFLDAETLALSTEALTEITLGQLTEGAWGTKVRCGLIGEIGCSWPLTPFERRSLKSGARAQIATGAAITIHPGGDRAAPDEILDVLEAEGADLSRVVIGHMDRTLLDDADVVALARRGSIVEYDFFGIEHSNYWLGVVDIPNDWMRIRALRKLFDAGLGDRVVISHDICTRTRLQSLGGHGYGHILRNVVPLMRDRGFSQSEIDLLLLETPRRILTIGG

SEQ ID NO: 888 - protein, 349 aa, Artificial Sequence
  Synthetic
MAAAETGTGHARIETVLGPIAPAALGATLMHEHLLCDLTPPARRGQGLPEPEITLETIFDMGYRPGRYHGNHRLQDVALATREAAAFKADGGGAIVELTTGGIVPDPEGLAAIARGAGIHVVLGAGFYTENFLDAETLALSTEALTEITLGQLTEGAWGTKVRCGLIGEIGCSWPLTPFERRSLKSGARAQIATGAAITIHPGHDRAAPDEILDVLEAEGADLSRVVIGHMDRTLLDDADVVALARRGSIVEYDFFGIEHSNYWLGVVDIPNDWMRIRALRKLFDAGLGDRVVISHDICTRTRLQSLGGHGYGHILRNVVPLMRDRGFSQSEIDLLLLETPRRILTIGG

SEQ ID NO: 889 - protein, 349 aa, Artificial Sequence
  Synthetic
MAAAETGTGHARIETVLGPIAPAALGATLMHEHLLCDLTPPARRGQGLPEPEITLETIFDMGYRPGRYHGNHRLQDVALATREAAAFKADGGGAIVELTTGGIVPDPEGLAAIARGAGIHVVLGAGFYTENFLDAETLALSTEALTEITLGQLTEGAWGTKVRCGLIGEIGCSWPLTPFERRSLKSGARAQIATGAAITIHPGMDRAAPDEILDVLEAEGADLSRVVIGHMDRTLLDDADVVALARRGSIVEYDFFGIEHSNYWLGVVDIPNDWMRIRALRKLFDAGLGDRVVISHDICTRTRLQSLGGHGYGHILRNVVPLMRDRGFSQSEIDLLLLETPRRILTIGG

SEQ ID NO: 890 - protein, 349 aa, Artificial Sequence
  Synthetic
MAAAETGTGHARIETVLGPIAPAALGATLMHEHLLCDLTPPARRGQGLPEPEITLETIFDMGYRPGRYHGNHRLQDVALATREAAAFKADGGGAIVELTTGGIVPDPEGLAAIARGAGIHVVLGAGFYTENFLDAETLALSTEALTEITLGQLTEGAWGTKVRCGLIGEIGCSWPLTPFERRSLKSGARAQIATGAAITIHPGNDRAAPDEILDVLEAEGADLSRVVIGHMDRTLLDDADVVALARRGSIVEYDFFGIEHSNYWLGVVDIPNDWMRIRALRKLFDAGLGDRVVISHDICTRTRLQSLGGHGYGHILRNVVPLMRDRGFSQSEIDLLLLETPRRILTIGG

SEQ ID NO: 891 - protein, 349 aa, Artificial Sequence
  Synthetic
MAAAETGTGHARIETVLGPIAPAALGATLMHEHLLCDLTPPARRGQGLPEPEITLETIFDMGYRPGRYHGNHRLQDVALATREAAAFKADGGGAIVELTTGGIVPDPEGLAAIARGAGIHVVLGAGFYTENFLDAETLALSTEALTEITLGQLTEGAWGTKVRCGLIGEIGCSWPLTPFERRSLKSGARAQIATGAAITIHPGPDRAAPDEILDVLEAEGADLSRVVIGHMDRTLLDDADVVALARRGSIVEYDFFGIEHSNYWLGVVDIPNDWMRIRALRKLFDAGLGDRVVISHDICTRTRLQSLGGHGYGHILRNVVPLMRDRGFSQSEIDLLLLETPRRILTIGG

SEQ ID NO: 892 - protein, 349 aa, Artificial Sequence
  Synthetic
MAAAETGTGHARIETVLGPIAPAALGATLMHEHLLCDLTPPARRGQGLPEPEITLETIFDMGYRPGRYHGNHRLQDVALATREAAAFKADGGGAIVELTTGGIVPDPEGLAAIARGAGIHVVLGAGFYTENFLDAETLALSTEALTEITLGQLTEGAWGTKVRCGLIGEIGCSWPLTPFERRSLKSGARAQIATGAAITIHPGYDRAAPDEILDVLEAEGADLSRVVIGHMDRTLLDDADVVALARRGSIVEYDFFGIEHSNYWLGVVDIPNDWMRIRALRKLFDAGLGDRVVISHDICTRTRLQSLGGHGYGHILRNVVPLMRDRGFSQSEIDLLLLETPRRILTIGG

SEQ ID NO: 893 - protein, 349 aa, Artificial Sequence
  Synthetic
MAAAETGTGHARIETVLGPIAPAALGATLMHEHLLCDLTPPARRGQGLPEPEITLETIFDMGYRPGRYHGNHRLQDVALATREAAAFKADGGGAIVELTTGGIVPDPEGLAAIARGAGIHVVLGAGFYTENFLDAETLALSTEALTEITLGQLTEGAWGTKVRCGLIGEIGCSWPLTPFERRSLKSGARAQIATGAAITIHPGRDRAAPDEILDVLEAEGADLSRVVLGHMDRTLLDDADVVALARRGSIVEYDFFGIEHSNYWLGVVDIPNDWMRIRALRKLFDAGLGDRVVISHDICTRTRLQSLGGHGYGHILRNVVPLMRDRGFSQSEIDLLLLETPRRILTIGG

SEQ ID NO: 894 - protein, 349 aa, Artificial Sequence
  Synthetic
MAAAETGTGHARIETVLGPIAPAALGATLMHEHLLCDLTPPARRGQGLPEPEITLETIFDMGYRPGRYHGNHRLQDVALATREAAAFKADGGGAIVELTTGGIVPDPEGLAAIARGAGIHVVLGAGFYTENFLDAETLALSTEALTEITLGQLTEGAWGTKVRCGLIGEIGCSWPLTPFERRSLKSGARAQIATGAAITIHPGRDRAAPDEILDVLEAEGADLSRVVMGHMDRTLLDDADVVALARRGSIVEYDFFGIEHSNYWLGVVDIPNDWMRIRALRKLFDAGLGDRVVISHDICTRTRLQSLGGHGYGHILRNVVPLMRDRGFSQSEIDLLLLETPRRILTIGG

SEQ ID NO: 895 - protein, 349 aa, Artificial Sequence
  Synthetic
MAAAETGTGHARIETVLGPIAPAALGATLMHEHLLCDLTPPARRGQGLPEPEITLETIFDMGYRPGRYHGNHRLQDVALATREAAAFKADGGGAIVELTTGGIVPDPEGLAAIARGAGIHVVLGAGFYTENFLDAETLALSTEALTEITLGQLTEGAWGTKVRCGLIGEIGCSWPLTPFERRSLKSGARAQIATGAAITIHPGRDRAAPDEILDVLEAEGADLSRVVVGHMDRTLLDDADVVALARRGSIVEYDFFGIEHSNYWLGVVDIPNDWMRIRALRKLFDAGLGDRVVISHDICTRTRLQSLGGHGYGHILRNVVPLMRDRGFSQSEIDLLLLETPRRILTIGG

SEQ ID NO: 896 - protein, 349 aa, Artificial Sequence
  Synthetic
MAAAETGTGHARIETVLGPIAPAALGATLMHEHLLCDLTPPARRGQGLPEPEITLETIFDMGYRPGRYHGNHRLQDVALATREAAAFKADGGGAIVELTTGGIVPDPEGLAAIARGAGIHVVLGAGFYTENFLDAETLALSTEALTEITLGQLTEGAWGTKVRCGLIGEIGCSWPLTPFERRSLKSGARAQIATGAAITIHPGRDRAAPDEILDVLEAEGADLSRVVICHMDRTLLDDADVVALARRGSIVEYDFFGIEHSNYWLGVVDIPNDWMRIRALRKLFDAGLGDRVVISHDICTRTRLQSLGGHGYGHILRNVVPLMRDRGFSQSEIDLLLLETPRRILTIGG

SEQ ID NO: 897 - protein, 349 aa, Artificial Sequence
  Synthetic
MAAAETGTGHARIETVLGPIAPAALGATLMHEHLLCDLTPPARRGQGLPEPEITLETIFDMGYRPGRYHGNHRLQDVALATREAAAFKADGGGAIVELTTGGIVPDPEGLAAIARGAGIHVVLGAGFYTENFLDAETLALSTEALTEITLGQLTEGAWGTKVRCGLIGEIGCSWPLTPFERRSLKSGARAQIATGAAITIHPGRDRAAPDEILDVLEAEGADLSRVVINHMDRTLLDDADVVALARRGSIVEYDFFGIEHSNYWLGVVDIPNDWMRIRALRKLFDAGLGDRVVISHDICTRTRLQSLGGHGYGHILRNVVPLMRDRGFSQSEIDLLLLETPRRILTIGG

SEQ ID NO: 898 - protein, 349 aa, Artificial Sequence
  Synthetic
MAAAETGTGHARIETVLGPIAPAALGATLMHEHLLCDLTPPARRGQGLPEPEITLETIFDMGYRPGRYHGNHRLQDVALATREAAAFKADGGGAIVELTTGGIVPDPEGLAAIARGAGIHVVLGAGFYTENFLDAETLALSTEALTEITLGQLTEGAWGTKVRCGLIGEIGCSWPLTPFERRSLKSGARAQIATGAAITIHPGRDRAAPDEILDVLEAEGADLSRVVISHMDRTLLDDADVVALARRGSIVEYDFFGIEHSNYWLGVVDIPNDWMRIRALRKLFDAGLGDRVVISHDICTRTRLQSLGGHGYGHILRNVVPLMRDRGFSQSEIDLLLLETPRRILTIGG

SEQ ID NO: 899 - protein, 349 aa, Artificial Sequence
  Synthetic
MAAAETGTGHARIETVLGPIAPAALGATLMHEHLLCDLTPPARRGQGLPEPEITLETIFDMGYRPGRYHGNHRLQDVALATREAAAFKADGGGAIVELTTGGIVPDPEGLAAIARGAGIHVVLGAGFYTENFLDAETLALSTEALTEITLGQLTEGAWGTKVRCGLIGEIGCSWPLTPFERRSLKSGARAQIATGAAITIHPGRDRAAPDEILDVLEAEGADLSRVVITHMDRTLLDDADVVALARRGSIVEYDFFGIEHSNYWLGVVDIPNDWMRIRALRKLFDAGLGDRVVISHDICTRTRLQSLGGHGYGHILRNVVPLMRDRGFSQSEIDLLLLETPRRILTIGG

SEQ ID NO: 900 - protein, 349 aa, Artificial Sequence
  Synthetic
MAAAETGTGHARIETVLGPIAPAALGATLMHEHLLCDLTPPARRGQGLPEPEITLETIFDMGYRPGRYHGNHRLQDVALATREAAAFKADGGGAIVELTTGGIVPDPEGLAAIARGAGIHVVLGAGFYTENFLDAETLALSTEALTEITLGQLTEGAWGTKVRCGLIGEIGCSWPLTPFERRSLKSGARAQIATGAAITIHPGRDRAAPDEILDVLEAEGADLSRVVIGHCDRTLLDDADVVALARRGSIVEYDFFGIEHSNYWLGVVDIPNDWMRIRALRKLFDAGLGDRVVISHDICTRTRLQSLGGHGYGHILRNVVPLMRDRGFSQSEIDLLLLETPRRILTIGG

SEQ ID NO: 901 - protein, 349 aa, Artificial Sequence
  Synthetic
MAAAETGTGHARIETVLGPIAPAALGATLMHEHLLCDLTPPARRGQGLPEPEITLETIFDMGYRPGRYHGNHRLQDVALATREAAAFKADGGGAIVELTTGGIVPDPEGLAAIARGAGIHVVLGAGFYTENFLDAETLALSTEALTEITLGQLTEGAWGTKVRCGLIGEIGCSWPLTPFERRSLKSGARAQIATGAAITIHPGRDRAAPDEILDVLEAEGADLSRVVIGHIDRTLLDDADVVALARRGSIVEYDFFGIEHSNYWLGVVDIPNDWMRIRALRKLFDAGLGDRVVISHDICTRTRLQSLGGHGYGHILRNVVPLMRDRGFSQSEIDLLLLETPRRILTIGG

SEQ ID NO: 902 - protein, 349 aa, Artificial Sequence
  Synthetic
MAAAETGTGHARIETVLGPIAPAALGATLMHEHLLCDLTPPARRGQGLPEPEITLETIFDMGYRPGRYHGNHRLQDVALATREAAAFKADGGGAIVELTTGGIVPDPEGLAAIARGAGIHVVLGAGFYTENFLDAETLALSTEALTEITLGQLTEGAWGTKVRCGLIGEIGCSWPLTPFERRSLKSGARAQIATGAAITIHPGRDRAAPDEILDVLEAEGADLSRVVIGHLDRTLLDDADVVALARRGSIVEYDFFGIEHSNYWLGVVDIPNDWMRIRALRKLFDAGLGDRVVISHDICTRTRLQSLGGHGYGHILRNVVPLMRDRGFSQSEIDLLLLETPRRILTIGG

SEQ ID NO: 903 - protein, 349 aa, Artificial Sequence
  Synthetic
MAAAETGTGHARIETVLGPIAPAALGATLMHEHLLCDLTPPARRGQGLPEPEITLETIFDMGYRPGRYHGNHRLQDVALATREAAAFKADGGGAIVELTTGGIVPDPEGLAAIARGAGIHVVLGAGFYTENFLDAETLALSTEALTEITLGQLTEGAWGTKVRCGLIGEIGCSWPLTPFERRSLKSGARAQIATGAAITIHPGRDRAAPDEILDVLEAEGADLSRVVIGHVDRTLLDDADVVALARRGSIVEYDFFGIEHSNYWLGVVDIPNDWMRIRALRKLFDAGLGDRVVISHDICTRTRLQSLGGHGYGHILRNVVPLMRDRGFSQSEIDLLLLETPRRILTIGG

SEQ ID NO: 904 - protein, 349 aa, Artificial Sequence
  Synthetic
MAAAETGTGHARIETVLGPIAPAALGATLMHEHLLCDLTPPARRGQGLPEPEITLETIFDMGYRPGRYHGNHRLQDVALATREAAAFKADGGGAIVELTTGGIVPDPEGLAAIARGAGIHVVLGAGFYTENFLDAETLALSTEALTEITLGQLTEGAWGTKVRCGLIGEIGCSWPLTPFERRSLKSGARAQIATGAAITIHPGRDRAAPDEILDVLEAEGADLSRVVIGHMERTLLDDADVVALARRGSIVEYDFFGIEHSNYWLGVVDIPNDWMRIRALRKLFDAGLGDRVVISHDICTRTRLQSLGGHGYGHILRNVVPLMRDRGFSQSEIDLLLLETPRRILTIGG

SEQ ID NO: 905 - protein, 349 aa, Artificial Sequence
  Synthetic
MAAAETGTGHARIETVLGPIAPAALGATLMHEHLLCDLTPPARRGQGLPEPEITLETIFDMGYRPGRYHGNHRLQDVALATREAAAFKADGGGAIVELTTGGIVPDPEGLAAIARGAGIHVVLGAGFYTENFLDAETLALSTEALTEITLGQLTEGAWGTKVRCGLIGEIGCSWPLTPFERRSLKSGARAQIATGAAITIHPGRDRAAPDEILDVLEAEGADLSRVVIGHMGRTLLDDADVVALARRGSIVEYDFFGIEHSNYWLGVVDIPNDWMRIRALRKLFDAGLGDRVVISHDICTRTRLQSLGGHGYGHILRNVVPLMRDRGFSQSEIDLLLLETPRRILTIGG

SEQ ID NO: 906 - protein, 349 aa, Artificial Sequence
  Synthetic
MAAAETGTGHARIETVLGPIAPAALGATLMHEHLLCDLTPPARRGQGLPEPEITLETIFDMGYRPGRYHGNHRLQDVALATREAAAFKADGGGAIVELTTGGIVPDPEGLAAIARGAGIHVVLGAGFYTENFLDAETLALSTEALTEITLGQLTEGAWGTKVRCGLIGEIGCSWPLTPFERRSLKSGARAQIATGAAITIHPGRDRAAPDEILDVLEAEGADLSRVVIGHMNRTLLDDADVVALARRGSIVEYDFFGIEHSNYWLGVVDIPNDWMRIRALRKLFDAGLGDRVVISHDICTRTRLQSLGGHGYGHILRNVVPLMRDRGFSQSEIDLLLLETPRRILTIGG

SEQ ID NO: 907 - protein, 349 aa, Artificial Sequence
  Synthetic
MAAAETGTGHARIETVLGPIAPAALGATLMHEHLLCDLTPPARRGQGLPEPEITLETIFDMGYRPGRYHGNHRLQDVALATREAAAFKADGGGAIVELTTGGIVPDPEGLAAIARGAGIHVVLGAGFYTENFLDAETLALSTEALTEITLGQLTEGAWGTKVRCGLIGEIGCSWPLTPFERRSLKSGARAQIATGAAITIHPGRDRAAPDEILDVLEAEGADLSRVVIGHMDRTLFDDADVVALARRGSIVEYDFFGIEHSNYWLGVVDIPNDWMRIRALRKLFDAGLGDRVVISHDICTRTRLQSLGGHGYGHILRNVVPLMRDRGFSQSEIDLLLLETPRRILTIGG

SEQ ID NO: 908 - protein, 349 aa, Artificial Sequence
  Synthetic
MAAAETGTGHARIETVLGPIAPAALGATLMHEHLLCDLTPPARRGQGLPEPEITLETIFDMGYRPGRYHGNHRLQDVALATREAAAFKADGGGAIVELTTGGIVPDPEGLAAIARGAGIHVVLGAGFYTENFLDAETLALSTEALTEITLGQLTEGAWGTKVRCGLIGEIGCSWPLTPFERRSLKSGARAQIATGAAITIHPGRDRAAPDEILDVLEAEGADLSRVVIGHMDRTLIDDADVVALARRGSIVEYDFFGIEHSNYWLGVVDIPNDWMRIRALRKLFDAGLGDRVVISHDICTRTRLQSLGGHGYGHILRNVVPLMRDRGFSQSEIDLLLLETPRRILTIGG

SEQ ID NO: 909 - protein, 349 aa, Artificial Sequence
  Synthetic
MAAAETGTGHARIETVLGPIAPAALGATLMHEHLLCDLTPPARRGQGLPEPEITLETIFDMGYRPGRYHGNHRLQDVALATREAAAFKADGGGAIVELTTGGIVPDPEGLAAIARGAGIHVVLGAGFYTENFLDAETLALSTEALTEITLGQLTEGAWGTKVRCGLIGEIGCSWPLTPFERRSLKSGARAQIATGAAITIHPGRDRAAPDEILDVLEAEGADLSRVVIGHMDRTLMDDADVVALARRGSIVEYDFFGIEHSNYWLGVVDIPNDWMRIRALRKLFDAGLGDRVVISHDICTRTRLQSLGGHGYGHILRNVVPLMRDRGFSQSEIDLLLLETPRRILTIGG

SEQ ID NO: 910 - protein, 349 aa, Artificial Sequence
  Synthetic
MAAAETGTGHARIETVLGPIAPAALGATLMHEHLLCDLTPPARRGQGLPEPEITLETIFDMGYRPGRYHGNHRLQDVALATREAAAFKADGGGAIVELTTGGIVPDPEGLAAIARGAGIHVVLGAGFYTENFLDAETLALSTEALTEITLGQLTEGAWGTKVRCGLIGEIGCSWPLTPFERRSLKSGARAQIATGAAITIHPGRDRAAPDEILDVLEAEGADLSRVVIGHMDRTLWDDADVVALARRGSIVEYDFFGIEHSNYWLGVVDIPNDWMRIRALRKLFDAGLGDRVVISHDICTRTRLQSLGGHGYGHILRNVVPLMRDRGFSQSEIDLLLLETPRRILTIGG

SEQ ID NO: 911 - protein, 349 aa, Artificial Sequence
  Synthetic
MAAAETGTGHARIETVLGPIAPAALGATLMHEHLLCDLTPPARRGQGLPEPEITLETIFDMGYRPGRYHGNHRLQDVALATREAAAFKADGGGAIVELTTGGIVPDPEGLAAIARGAGIHVVLGAGFYTENFLDAETLALSTEALTEITLGQLTEGAWGTKVRCGLIGEIGCSWPLTPFERRSLKSGARAQIATGAAITIHPGRDRAAPDEILDVLEAEGADLSRVVIGHMDRTLLDDADVVALARRGSILEYDFFGIEHSNYWLGVVDIPNDWMRIRALRKLFDAGLGDRVVISHDICTRTRLQSLGGHGYGHILRNVVPLMRDRGFSQSEIDLLLLETPRRILTIGG

SEQ ID NO: 912 - protein, 349 aa, Artificial Sequence
  Synthetic
MAAAETGTGHARIETVLGPIAPAALGATLMHEHLLCDLTPPARRGQGLPEPEITLETIFDMGYRPGRYHGNHRLQDVALATREAAAFKADGGGAIVELTTGGIVPDPEGLAAIARGAGIHVVLGAGFYTENFLDAETLALSTEALTEITLGQLTEGAWGTKVRCGLIGEIGCSWPLTPFERRSLKSGARAQIATGAAITIHPGRDRAAPDEILDVLEAEGADLSRVVIGHMDRTLLDDADVVALARRGSIMEYDFFGIEHSNYWLGVVDIPNDWMRIRALRKLFDAGLGDRVVISHDICTRTRLQSLGGHGYGHILRNVVPLMRDRGFSQSEIDLLLLETPRRILTIGG

SEQ ID NO: 913 - protein, 349 aa, Artificial Sequence
  Synthetic
MAAAETGTGHARIETVLGPIAPAALGATLMHEHLLCDLTPPARRGQGLPEPEITLETIFDMGYRPGRYHGNHRLQDVALATREAAAFKADGGGAIVELTTGGIVPDPEGLAAIARGAGIHVVLGAGFYTENFLDAETLALSTEALTEITLGQLTEGAWGTKVRCGLIGEIGCSWPLTPFERRSLKSGARAQIATGAAITIHPGRDRAAPDEILDVLEAEGADLSRVVIGHMDRTLLDDADVVALARRGSIVAYDFFGIEHSNYWLGVVDIPNDWMRIRALRKLFDAGLGDRVVISHDICTRTRLQSLGGHGYGHILRNVVPLMRDRGFSQSEIDLLLLETPRRILTIGG

SEQ ID NO: 914 - protein, 349 aa, Artificial Sequence
  Synthetic
MAAAETGTGHARIETVLGPIAPAALGATLMHEHLLCDLTPPARRGQGLPEPEITLETIFDMGYRPGRYHGNHRLQDVALATREAAAFKADGGGAIVELTTGGIVPDPEGLAAIARGAGIHVVLGAGFYTENFLDAETLALSTEALTEITLGQLTEGAWGTKVRCGLIGEIGCSWPLTPFERRSLKSGARAQIATGAAITIHPGRDRAAPDEILDVLEAEGADLSRVVIGHMDRTLLDDADVVALARRGSIVGYDFFGIEHSNYWLGVVDIPNDWMRIRALRKLFDAGLGDRVVISHDICTRTRLQSLGGHGYGHILRNVVPLMRDRGFSQSEIDLLLLETPRRILTIGG

SEQ ID NO: 915 - protein, 349 aa, Artificial Sequence
  Synthetic
MAAAETGTGHARIETVLGPIAPAALGATLMHEHLLCDLTPPARRGQGLPEPEITLETIFDMGYRPGRYHGNHRLQDVALATREAAAFKADGGGAIVELTTGGIVPDPEGLAAIARGAGIHVVLGAGFYTENFLDAETLALSTEALTEITLGQLTEGAWGTKVRCGLIGEIGCSWPLTPFERRSLKSGARAQIATGAAITIHPGRDRAAPDEILDVLEAEGADLSRVVIGHMDRTLLDDADVVALARRGSIVNYDFFGIEHSNYWLGVVDIPNDWMRIRALRKLFDAGLGDRVVISHDICTRTRLQSLGGHGYGHILRNVVPLMRDRGFSQSEIDLLLLETPRRILTIGG

SEQ ID NO: 916 - protein, 349 aa, Artificial Sequence
  Synthetic
MAAAETGTGHARIETVLGPIAPAALGATLMHEHLLCDLTPPARRGQGLPEPEITLETIFDMGYRPGRYHGNHRLQDVALATREAAAFKADGGGAIVELTTGGIVPDPEGLAAIARGAGIHVVLGAGFYTENFLDAETLALSTEALTEITLGQLTEGAWGTKVRCGLIGEIGCSWPLTPFERRSLKSGARAQIATGAAITIHPGRDRAAPDEILDVLEAEGADLSRVVIGHMDRTLLDDADVVALARRGSIVQYDFFGIEHSNYWLGVVDIPNDWMRIRALRKLFDAGLGDRVVISHDICTRTRLQSLGGHGYGHILRNVVPLMRDRGFSQSEIDLLLLETPRRILTIGG

SEQ ID NO: 917 - protein, 349 aa, Artificial Sequence
  Synthetic
MAAAETGTGHARIETVLGPIAPAALGATLMHEHLLCDLTPPARRGQGLPEPEITLETIFDMGYRPGRYHGNHRLQDVALATREAAAFKADGGGAIVELTTGGIVPDPEGLAAIARGAGIHVVLGAGFYTENFLDAETLALSTEALTEITLGQLTEGAWGTKVRCGLIGEIGCSWPLTPFERRSLKSGARAQIATGAAITIHPGRDRAAPDEILDVLEAEGADLSRVVIGHMDRTLLDDADVVALARRGSIVSYDFFGIEHSNYWLGVVDIPNDWMRIRALRKLFDAGLGDRVVISHDICTRTRLQSLGGHGYGHILRNVVPLMRDRGFSQSEIDLLLLETPRRILTIGG

SEQ ID NO: 918 - protein, 349 aa, Artificial Sequence
  Synthetic
MAAAETGTGHARIETVLGPIAPAALGATLMHEHLLCDLTPPARRGQGLPEPEITLETIFDMGYRPGRYHGNHRLQDVALATREAAAFKADGGGAIVELTTGGIVPDPEGLAAIARGAGIHVVLGAGFYTENFLDAETLALSTEALTEITLGQLTEGAWGTKVRCGLIGEIGCSWPLTPFERRSLKSGARAQIATGAAITIHPGRDRAAPDEILDVLEAEGADLSRVVIGHMDRTLLDDADVVALARRGSIVEYNFFGIEHSNYWLGVVDIPNDWMRIRALRKLFDAGLGDRVVISHDICTRTRLQSLGGHGYGHILRNVVPLMRDRGFSQSEIDLLLLETPRRILTIGG

SEQ ID NO: 919 - protein, 349 aa, Artificial Sequence
  Synthetic
MAAAETGTGHARIETVLGPIAPAALGATLMHEHLLCDLTPPARRGQGLPEPEITLETIFDMGYRPGRYHGNHRLQDVALATREAAAFKADGGGAIVELTTGGIVPDPEGLAAIARGAGIHVVLGAGFYTENFLDAETLALSTEALTEITLGQLTEGAWGTKVRCGLIGEIGCSWPLTPFERRSLKSGARAQIATGAAITIHPGRDRAAPDEILDVLEAEGADLSRVVIGHMDRTLLDDADVVALARRGSIVEYDMFGIEHSNYWLGVVDIPNDWMRIRALRKLFDAGLGDRVVISHDICTRTRLQSLGGHGYGHILRNVVPLMRDRGFSQSEIDLLLLETPRRILTIGG

SEQ ID NO: 920 - protein, 349 aa, Artificial Sequence
  Synthetic
MAAAETGTGHARIETVLGPIAPAALGATLMHEHLLCDLTPPARRGQGLPEPEITLETIFDMGYRPGRYHGNHRLQDVALATREAAAFKADGGGAIVELTTGGIVPDPEGLAAIARGAGIHVVLGAGFYTENFLDAETLALSTEALTEITLGQLTEGAWGTKVRCGLIGEIGCSWPLTPFERRSLKSGARAQIATGAAITIHPGRDRAAPDEILDVLEAEGADLSRVVIGHMDRTLLDDADVVALARRGSIVEYDWFGIEHSNYWLGVVDIPNDWMRIRALRKLFDAGLGDRVVISHDICTRTRLQSLGGHGYGHILRNVVPLMRDRGFSQSEIDLLLLETPRRILTIGG

SEQ ID NO: 921 - protein, 349 aa, Artificial Sequence
  Synthetic
MAAAETGTGHARIETVLGPIAPAALGATLMHEHLLCDLTPPARRGQGLPEPEITLETIFDMGYRPGRYHGNHRLQDVALATREAAAFKADGGGAIVELTTGGIVPDPEGLAAIARGAGIHVVLGAGFYTENFLDAETLALSTEALTEITLGQLTEGAWGTKVRCGLIGEIGCSWPLTPFERRSLKSGARAQIATGAAITIHPGRDRAAPDEILDVLEAEGADLSRVVIGHMDRTLLDDADVVALARRGSIVEYDYFGIEHSNYWLGVVDIPNDWMRIRALRKLFDAGLGDRVVISHDICTRTRLQSLGGHGYGHILRNVVPLMRDRGFSQSEIDLLLLETPRRILTIGG

SEQ ID NO: 922 - protein, 349 aa, Artificial Sequence
  Synthetic
MAAAETGTGHARIETVLGPIAPAALGATLMHEHLLCDLTPPARRGQGLPEPEITLETIFDMGYRPGRYHGNHRLQDVALATREAAAFKADGGGAIVELTTGGIVPDPEGLAAIARGAGIHVVLGAGFYTENFLDAETLALSTEALTEITLGQLTEGAWGTKVRCGLIGEIGCSWPLTPFERRSLKSGARAQIATGAAITIHPGRDRAAPDEILDVLEAEGADLSRVVIGHMDRTLLDDADVVALARRGSIVEYDFFGFEHSNYWLGVVDIPNDWMRIRALRKLFDAGLGDRVVISHDICTRTRLQSLGGHGYGHILRNVVPLMRDRGFSQSEIDLLLLETPRRILTIGG

SEQ ID NO: 923 - protein, 349 aa, Artificial Sequence
  Synthetic
MAAAETGTGHARIETVLGPIAPAALGATLMHEHLLCDLTPPARRGQGLPEPEITLETIFDMGYRPGRYHGNHRLQDVALATREAAAFKADGGGAIVELTTGGIVPDPEGLAAIARGAGIHVVLGAGFYTENFLDAETLALSTEALTEITLGQLTEGAWGTKVRCGLIGEIGCSWPLTPFERRSLKSGARAQIATGAAITIHPGRDRAAPDEILDVLEAEGADLSRVVIGHMDRTLLDDADVVALARRGSIVEYDFFGHEHSNYWLGVVDIPNDWMRIRALRKLFDAGLGDRVVISHDICTRTRLQSLGGHGYGHILRNVVPLMRDRGFSQSEIDLLLLETPRRILTIGG

SEQ ID NO: 924 - protein, 349 aa, Artificial Sequence
  Synthetic
MAAAETGTGHARIETVLGPIAPAALGATLMHEHLLCDLTPPARRGQGLPEPEITLETIFDMGYRPGRYHGNHRLQDVALATREAAAFKADGGGAIVELTTGGIVPDPEGLAAIARGAGIHVVLGAGFYTENFLDAETLALSTEALTEITLGQLTEGAWGTKVRCGLIGEIGCSWPLTPFERRSLKSGARAQIATGAAITIHPGRDRAAPDEILDVLEAEGADLSRVVIGHMDRTLLDDADVVALARRGSIVEYDFFGKEHSNYWLGVVDIPNDWMRIRALRKLFDAGLGDRVVISHDICTRTRLQSLGGHGYGHILRNVVPLMRDRGFSQSEIDLLLLETPRRILTIGG

SEQ ID NO: 925 - protein, 349 aa, Artificial Sequence
  Synthetic
MAAAETGTGHARIETVLGPIAPAALGATLMHEHLLCDLTPPARRGQGLPEPEITLETIFDMGYRPGRYHGNHRLQDVALATREAAAFKADGGGAIVELTTGGIVPDPEGLAAIARGAGIHVVLGAGFYTENFLDAETLALSTEALTEITLGQLTEGAWGTKVRCGLIGEIGCSWPLTPFERRSLKSGARAQIATGAAITIHPGRDRAAPDEILDVLEAEGADLSRVVIGHMDRTLLDDADVVALARRGSIVEYDFFGLEHSNYWLGVVDIPNDWMRIRALRKLFDAGLGDRVVISHDICTRTRLQSLGGHGYGHILRNVVPLMRDRGFSQSEIDLLLLETPRRILTIGG

SEQ ID NO: 926 - protein, 349 aa, Artificial Sequence
  Synthetic
MAAAETGTGHARIETVLGPIAPAALGATLMHEHLLCDLTPPARRGQGLPEPEITLETIFDMGYRPGRYHGNHRLQDVALATREAAAFKADGGGAIVELTTGGIVPDPEGLAAIARGAGIHVVLGAGFYTENFLDAETLALSTEALTEITLGQLTEGAWGTKVRCGLIGEIGCSWPLTPFERRSLKSGARAQIATGAAITIHPGRDRAAPDEILDVLEAEGADLSRVVIGHMDRTLLDDADVVALARRGSIVEYDFFGNEHSNYWLGVVDIPNDWMRIRALRKLFDAGLGDRVVISHDICTRTRLQSLGGHGYGHILRNVVPLMRDRGFSQSEIDLLLLETPRRILTIGG

SEQ ID NO: 927 - protein, 349 aa, Artificial Sequence
  Synthetic
MAAAETGTGHARIETVLGPIAPAALGATLMHEHLLCDLTPPARRGQGLPEPEITLETIFDMGYRPGRYHGNHRLQDVALATREAAAFKADGGGAIVELTTGGIVPDPEGLAAIARGAGIHVVLGAGFYTENFLDAETLALSTEALTEITLGQLTEGAWGTKVRCGLIGEIGCSWPLTPFERRSLKSGARAQIATGAAITIHPGRDRAAPDEILDVLEAEGADLSRVVIGHMDRTLLDDADVVALARRGSIVEYDFFGPEHSNYWLGVVDIPNDWMRIRALRKLFDAGLGDRVVISHDICTRTRLQSLGGHGYGHILRNVVPLMRDRGFSQSEIDLLLLETPRRILTIGG

SEQ ID NO: 928 - protein, 349 aa, Artificial Sequence
  Synthetic
MAAAETGTGHARIETVLGPIAPAALGATLMHEHLLCDLTPPARRGQGLPEPEITLETIFDMGYRPGRYHGNHRLQDVALATREAAAFKADGGGAIVELTTGGIVPDPEGLAAIARGAGIHVVLGAGFYTENFLDAETLALSTEALTEITLGQLTEGAWGTKVRCGLIGEIGCSWPLTPFERRSLKSGARAQIATGAAITIHPGRDRAAPDEILDVLEAEGADLSRVVIGHMDRTLLDDADVVALARRGSIVEYDFFGVEHSNYWLGVVDIPNDWMRIRALRKLFDAGLGDRVVISHDICTRTRLQSLGGHGYGHILRNVVPLMRDRGFSQSEIDLLLLETPRRILTIGG

SEQ ID NO: 929 - protein, 349 aa, Artificial Sequence
  Synthetic
MAAAETGTGHARIETVLGPIAPAALGATLMHEHLLCDLTPPARRGQGLPEPEITLETIFDMGYRPGRYHGNHRLQDVALATREAAAFKADGGGAIVELTTGGIVPDPEGLAAIARGAGIHVVLGAGFYTENFLDAETLALSTEALTEITLGQLTEGAWGTKVRCGLIGEIGCSWPLTPFERRSLKSGARAQIATGAAITIHPGRDRAAPDEILDVLEAEGADLSRVVIGHMDRTLLDDADVVALARRGSIVEYDFFGWEHSNYWLGVVDIPNDWMRIRALRKLFDAGLGDRVVISHDICTRTRLQSLGGHGYGHILRNVVPLMRDRGFSQSEIDLLLLETPRRILTIGG

SEQ ID NO: 930 - protein, 349 aa, Artificial Sequence
  Synthetic
MAAAETGTGHARIETVLGPIAPAALGATLMHEHLLCDLTPPARRGQGLPEPEITLETIFDMGYRPGRYHGNHRLQDVALATREAAAFKADGGGAIVELTTGGIVPDPEGLAAIARGAGIHVVLGAGFYTENFLDAETLALSTEALTEITLGQLTEGAWGTKVRCGLIGEIGCSWPLTPFERRSLKSGARAQIATGAAITIHPGRDRAAPDEILDVLEAEGADLSRVVIGHMDRTLLDDADVVALARRGSIVEYDFFGIEHSNYWLGVVDCPNDWMRIRALRKLFDAGLGDRVVISHDICTRTRLQSLGGHGYGHILRNVVPLMRDRGFSQSEIDLLLLETPRRILTIGG

SEQ ID NO: 931 - protein, 349 aa, Artificial Sequence
  Synthetic
MAAAETGTGHARIETVLGPIAPAALGATLMHEHLLCDLTPPARRGQGLPEPEITLETIFDMGYRPGRYHGNHRLQDVALATREAAAFKADGGGAIVELTTGGIVPDPEGLAAIARGAGIHVVLGAGFYTENFLDAETLALSTEALTEITLGQLTEGAWGTKVRCGLIGEIGCSWPLTPFERRSLKSGARAQIATGAAITIHPGRDRAAPDEILDVLEAEGADLSRVVIGHMDRTLLDDADVVALARRGSIVEYDFFGIEHSNYWLGVVDHPNDWMRIRALRKLFDAGLGDRVVISHDICTRTRLQSLGGHGYGHILRNVVPLMRDRGFSQSEIDLLLLETPRRILTIGG

SEQ ID NO: 932 - protein, 349 aa, Artificial Sequence
  Synthetic
MAAAETGTGHARIETVLGPIAPAALGATLMHEHLLCDLTPPARRGQGLPEPEITLETIFDMGYRPGRYHGNHRLQDVALATREAAAFKADGGGAIVELTTGGIVPDPEGLAAIARGAGIHVVLGAGFYTENFLDAETLALSTEALTEITLGQLTEGAWGTKVRCGLIGEIGCSWPLTPFERRSLKSGARAQIATGAAITIHPGRDRAAPDEILDVLEAEGADLSRVVIGHMDRTLLDDADVVALARRGSIVEYDFFGIEHSNYWLGVVDLPNDWMRIRALRKLFDAGLGDRVVISHDICTRTRLQSLGGHGYGHILRNVVPLMRDRGFSQSEIDLLLLETPRRILTIGG

SEQ ID NO: 933 - protein, 349 aa, Artificial Sequence
  Synthetic
MAAAETGTGHARIETVLGPIAPAALGATLMHEHLLCDLTPPARRGQGLPEPEITLETIFDMGYRPGRYHGNHRLQDVALATREAAAFKADGGGAIVELTTGGIVPDPEGLAAIARGAGIHVVLGAGFYTENFLDAETLALSTEALTEITLGQLTEGAWGTKVRCGLIGEIGCSWPLTPFERRSLKSGARAQIATGAAITIHPGRDRAAPDEILDVLEAEGADLSRVVIGHMDRTLLDDADVVALARRGSIVEYDFFGIEHSNYWLGVVDPPNDWMRIRALRKLFDAGLGDRVVISHDICTRTRLQSLGGHGYGHILRNVVPLMRDRGFSQSEIDLLLLETPRRILTIGG

SEQ ID NO: 934 - protein, 349 aa, Artificial Sequence
  Synthetic
MAAAETGTGHARIETVLGPIAPAALGATLMHEHLLCDLTPPARRGQGLPEPEITLETIFDMGYRPGRYHGNHRLQDVALATREAAAFKADGGGAIVELTTGGIVPDPEGLAAIARGAGIHVVLGAGFYTENFLDAETLALSTEALTEITLGQLTEGAWGTKVRCGLIGEIGCSWPLTPFERRSLKSGARAQIATGAAITIHPGRDRAAPDEILDVLEAEGADLSRVVIGHMDRTLLDDADVVALARRGSIVEYDFFGIEHSNYWLGVVDVPNDWMRIRALRKLFDAGLGDRVVISHDICTRTRLQSLGGHGYGHILRNVVPLMRDRGFSQSEIDLLLLETPRRILTIGG

SEQ ID NO: 935 - protein, 349 aa, Artificial Sequence
  Synthetic
MAAAETGTGHARIETVLGPIAPAALGATLMHEHLLCDLTPPARRGQGLPEPEITLETIFDMGYRPGRYHGNHRLQDVALATREAAAFKADGGGAIVELTTGGIVPDPEGLAAIARGAGIHVVLGAGFYTENFLDAETLALSTEALTEITLGQLTEGAWGTKVRCGLIGEIGCSWPLTPFERRSLKSGARAQIATGAAITIHPGRDRAAPDEILDVLEAEGADLSRVVIGHMDRTLLDDADVVALARRGSIVEYDFFGIEHSNYWLGVVDIPNDWMRIRALRKLFDAGLGDRVVIAHDICTRTRLQSLGGHGYGHILRNVVPLMRDRGFSQSEIDLLLLETPRRILTIGG

SEQ ID NO: 936 - protein, 349 aa, Artificial Sequence
  Synthetic
MAAAETGTGHARIETVLGPIAPAALGATLMHEHLLCDLTPPARRGQGLPEPEITLETIFDMGYRPGRYHGNHRLQDVALATREAAAFKADGGGAIVELTTGGIVPDPEGLAAIARGAGIHVVLGAGFYTENFLDAETLALSTEALTEITLGQLTEGAWGTKVRCGLIGEIGCSWPLTPFERRSLKSGARAQIATGAAITIHPGRDRAAPDEILDVLEAEGADLSRVVIGHMDRTLLDDADVVALARRGSIVEYDFFGIEHSNYWLGVVDIPNDWMRIRALRKLFDAGLGDRVVISCDICTRTRLQSLGGHGYGHILRNVVPLMRDRGFSQSEIDLLLLETPRRILTIGG

SEQ ID NO: 937 - protein, 349 aa, Artificial Sequence
  Synthetic
MAAAETGTGHARIETVLGPIAPAALGATLMHEHLLCDLTPPARRGQGLPEPEITLETIFDMGYRPGRYHGNHRLQDVALATREAAAFKADGGGAIVELTTGGIVPDPEGLAAIARGAGIHVVLGAGFYTENFLDAETLALSTEALTEITLGQLTEGAWGTKVRCGLIGEIGCSWPLTPFERRSLKSGARAQIATGAAITIHPGRDRAAPDEILDVLEAEGADLSRVVIGHMDRTLLDDADVVALARRGSIVEYDFFGIEHSNYWLGVVDIPNDWMRIRALRKLFDAGLGDRVVISMDICTRTRLQSLGGHGYGHILRNVVPLMRDRGFSQSEIDLLLLETPRRILTIGG

SEQ ID NO: 938 - protein, 349 aa, Artificial Sequence
  Synthetic
MAAAETGTGHARIETVLGPIAPAALGATLMHEHLLCDLTPPARRGQGLPEPEITLETIFDMGYRPGRYHGNHRLQDVALATREAAAFKADGGGAIVELTTGGIVPDPEGLAAIARGAGIHVVLGAGFYTENFLDAETLALSTEALTEITLGQLTEGAWGTKVRCGLIGEIGCSWPLTPFERRSLKSGARAQIATGAAITIHPGRDRAAPDEILDVLEAEGADLSRVVIGHMDRTLLDDADVVALARRGSIVEYDFFGIEHSNYWLGVVDIPNDWMRIRALRKLFDAGLGDRVVISNDICTRTRLQSLGGHGYGHILRNVVPLMRDRGFSQSEIDLLLLETPRRILTIGG

SEQ ID NO: 939 - protein, 349 aa, Artificial Sequence
  Synthetic
MAAAETGTGHARIETVLGPIAPAALGATLMHEHLLCDLTPPARRGQGLPEPEITLETIFDMGYRPGRYHGNHRLQDVALATREAAAFKADGGGAIVELTTGGIVPDPEGLAAIARGAGIHVVLGAGFYTENFLDAETLALSTEALTEITLGQLTEGAWGTKVRCGLIGEIGCSWPLTPFERRSLKSGARAQIATGAAITIHPGRDRAAPDEILDVLEAEGADLSRVVIGHMDRTLLDDADVVALARRGSIVEYDFFGIEHSNYWLGVVDIPNDWMRIRALRKLFDAGLGDRVVISQDICTRTRLQSLGGHGYGHILRNVVPLMRDRGFSQSEIDLLLLETPRRILTIGG

SEQ ID NO: 940 - protein, 349 aa, Artificial Sequence
  Synthetic
MAAAETGTGHARIETVLGPIAPAALGATLMHEHLLCDLTPPARRGQGLPEPEITLETIFDMGYRPGRYHGNHRLQDVALATREAAAFKADGGGAIVELTTGGIVPDPEGLAAIARGAGIHVVLGAGFYTENFLDAETLALSTEALTEITLGQLTEGAWGTKVRCGLIGEIGCSWPLTPFERRSLKSGARAQIATGAAITIHPGRDRAAPDEILDVLEAEGADLSRVVIGHMDRTLLDDADVVALARRGSIVEYDFFGIEHSNYWLGVVDIPNDWMRIRALRKLFDAGLGDRVVISTDICTRTRLQSLGGHGYGHILRNVVPLMRDRGFSQSEIDLLLLETPRRILTIGG

SEQ ID NO: 941 - protein, 349 aa, Artificial Sequence
  Synthetic
MAAAETGTGHARIETVLGPIAPAALGATLMHEHLLCDLTPPARRGQGLPEPEITLETIFDMGYRPGRYHGNHRLQDVALATREAAAFKADGGGAIVELTTGGIVPDPEGLAAIARGAGIHVVLGAGFYTENFLDAETLALSTEALTEITLGQLTEGAWGTKVRCGLIGEIGCSWPLTPFERRSLKSGARAQIATGAAITIHPGRDRAAPDEILDVLEAEGADLSRVVIGHMDRTLLDDADVVALARRGSIVEYDFFGIEHSNYWLGVVDIPNDWMRIRALRKLFDAGLGDRVVISHGICTRTRLQSLGGHGYGHILRNVVPLMRDRGFSQSEIDLLLLETPRRILTIGG

SEQ ID NO: 942 - protein, 349 aa, Artificial Sequence
  Synthetic
MAAAETGTGHARIETVLGPIAPAALGATLMHEHLLCDLTPPARRGQGLPEPEITLETIFDMGYRPGRYHGNHRLQDVALATREAAAFKADGGGAIVELTTGGIVPDPEGLAAIARGAGIHVVLGAGFYTENFLDAETLALSTEALTEITLGQLTEGAWGTKVRCGLIGEIGCSWPLTPFERRSLKSGARAQIATGAAITIHPGRDRAAPDEILDVLEAEGADLSRVVIGHMDRTLLDDADVVALARRGSIVEYDFFGIEHSNYWLGVVDIPNDWMRIRALRKLFDAGLGDRVVISHNICTRTRLQSLGGHGYGHILRNVVPLMRDRGFSQSEIDLLLLETPRRILTIGG

SEQ ID NO: 943 - protein, 349 aa, Artificial Sequence
  Synthetic
MAAAETGTGHARIETVLGPIAPAALGATLMHEHLLCDLTPPARRGQGLPEPEITLETIFDMGYRPGRYHGNHRLQDVALATREAAAFKADGGGAIVELTTGGIVPDPEGLAAIARGAGIHVVLGAGFYTENFLDAETLALSTEALTEITLGQLTEGAWGTKVRCGLIGEIGCSWPLTPFERRSLKSGARAQIATGAAITIHPGRDRAAPDEILDVLEAEGADLSRVVIGHMDRTLLDDADVVALARRGSIVEYDFFGIEHSNYWLGVVDIPNDWMRIRALRKLFDAGLGDRVVISHSICTRTRLQSLGGHGYGHILRNVVPLMRDRGFSQSEIDLLLLETPRRILTIGG

SEQ ID NO: 944 - protein, 349 aa, Artificial Sequence
  Synthetic
MAAAETGTGHARIETVLGPIAPAALGATLMHEHLLCDLTPPARRGQGLPEPEITLETIFDMGYRPGRYHGNHRLQDVALATREAAAFKADGGGAIVELTTGGIVPDPEGLAAIARGAGIHVVLGAGFYTENFLDAETLALSTEALTEITLGQLTEGAWGTKVRCGLIGEIGCSWPLTPFERRSLKSGARAQIATGAAITIHPGRDRAAPDEILDVLEAEGADLSRVVIGHMDRTLLDDADVVALARRGSIVEYDFFGIEHSNYWLGVVDIPNDWMRIRALRKLFDAGLGDRVVISHDMCTRTRLQSLGGHGYGHILRNVVPLMRDRGFSQSEIDLLLLETPRRILTIGG

SEQ ID NO: 945 - protein, 349 aa, Artificial Sequence
  Synthetic
MAAAETGTGHARIETVLGPIAPAALGATLMHEHLLCDLTPPARRGQGLPEPEITLETIFDMGYRPGRYHGNHRLQDVALATREAAAFKADGGGAIVELTTGGIVPDPEGLAAIARGAGIHVVLGAGFYTENFLDAETLALSTEALTEITLGQLTEGAWGTKVRCGLIGEIGCSWPLTPFERRSLKSGARAQIATGAAITIHPGRDRAAPDEILDVLEAEGADLSRVVIGHMDRTLLDDADVVALARRGSIVEYDFFGIEHSNYWLGVVDIPNDWMRIRALRKLFDAGLGDRVVISHDVCTRTRLQSLGGHGYGHILRNVVPLMRDRGFSQSEIDLLLLETPRRILTIGG

SEQ ID NO: 946 - protein, 349 aa, Artificial Sequence
  Synthetic
MAAAETGTGHARIETVLGPIAPAALGATLMHEHLLCDLTPPARRGQGLPEPEITLETIFDMGYRPGRYHGNHRLQDVALATREAAAFKADGGGAIVELTTGGIVPDPEGLAAIARGAGIHVVLGAGFYTENFLDAETLALSTEALTEITLGQLTEGAWGTKVRCGLIGEIGCSWPLTPFERRSLKSGARAQIATGAAITIHPGRDRAAPDEILDVLEAEGADLSRVVIGHMDRTLLDDADVVALARRGSIVEYDFFGIEHSNYWLGVVDIPNDWMRIRALRKLFDAGLGDRVVISHDIATRTRLQSLGGHGYGHILRNVVPLMRDRGFSQSEIDLLLLETPRRILTIGG

SEQ ID NO: 947 - protein, 349 aa, Artificial Sequence
  Synthetic
MAAAETGTGHARIETVLGPIAPAALGATLMHEHLLCDLTPPARRGQGLPEPEITLETIFDMGYRPGRYHGNHRLQDVALATREAAAFKADGGGAIVELTTGGIVPDPEGLAAIARGAGIHVVLGAGFYTENFLDAETLALSTEALTEITLGQLTEGAWGTKVRCGLIGEIGCSWPLTPFERRSLKSGARAQIATGAAITIHPGRDRAAPDEILDVLEAEGADLSRVVIGHMDRTLLDDADVVALARRGSIVEYDFFGIEHSNYWLGVVDIPNDWMRIRALRKLFDAGLGDRVVISHDIFTRTRLQSLGGHGYGHILRNVVPLMRDRGFSQSEIDLLLLETPRRILTIGG

SEQ ID NO: 948 - protein, 349 aa, Artificial Sequence
  Synthetic
MAAAETGTGHARIETVLGPIAPAALGATLMHEHLLCDLTPPARRGQGLPEPEITLETIFDMGYRPGRYHGNHRLQDVALATREAAAFKADGGGAIVELTTGGIVPDPEGLAAIARGAGIHVVLGAGFYTENFLDAETLALSTEALTEITLGQLTEGAWGTKVRCGLIGEIGCSWPLTPFERRSLKSGARAQIATGAAITIHPGRDRAAPDEILDVLEAEGADLSRVVIGHMDRTLLDDADVVALARRGSIVEYDFFGIEHSNYWLGVVDIPNDWMRIRALRKLFDAGLGDRVVISHDIGTRTRLQSLGGHGYGHILRNVVPLMRDRGFSQSEIDLLLLETPRRILTIGG

SEQ ID NO: 949 - protein, 349 aa, Artificial Sequence
  Synthetic
MAAAETGTGHARIETVLGPIAPAALGATLMHEHLLCDLTPPARRGQGLPEPEITLETIFDMGYRPGRYHGNHRLQDVALATREAAAFKADGGGAIVELTTGGIVPDPEGLAAIARGAGIHVVLGAGFYTENFLDAETLALSTEALTEITLGQLTEGAWGTKVRCGLIGEIGCSWPLTPFERRSLKSGARAQIATGAAITIHPGRDRAAPDEILDVLEAEGADLSRVVIGHMDRTLLDDADVVALARRGSIVEYDFFGIEHSNYWLGVVDIPNDWMRIRALRKLFDAGLGDRVVISHDIHTRTRLQSLGGHGYGHILRNVVPLMRDRGFSQSEIDLLLLETPRRILTIGG

SEQ ID NO: 950 - protein, 349 aa, Artificial Sequence
  Synthetic
MAAAETGTGHARIETVLGPIAPAALGATLMHEHLLCDLTPPARRGQGLPEPEITLETIFDMGYRPGRYHGNHRLQDVALATREAAAFKADGGGAIVELTTGGIVPDPEGLAAIARGAGIHVVLGAGFYTENFLDAETLALSTEALTEITLGQLTEGAWGTKVRCGLIGEIGCSWPLTPFERRSLKSGARAQIATGAAITIHPGRDRAAPDEILDVLEAEGADLSRVVIGHMDRTLLDDADVVALARRGSIVEYDFFGIEHSNYWLGVVDIPNDWMRIRALRKLFDAGLGDRVVISHDIMTRTRLQSLGGHGYGHILRNVVPLMRDRGFSQSEIDLLLLETPRRILTIGG

SEQ ID NO: 951 - protein, 349 aa, Artificial Sequence
  Synthetic
MAAAETGTGHARIETVLGPIAPAALGATLMHEHLLCDLTPPARRGQGLPEPEITLETIFDMGYRPGRYHGNHRLQDVALATREAAAFKADGGGAIVELTTGGIVPDPEGLAAIARGAGIHVVLGAGFYTENFLDAETLALSTEALTEITLGQLTEGAWGTKVRCGLIGEIGCSWPLTPFERRSLKSGARAQIATGAAITIHPGRDRAAPDEILDVLEAEGADLSRVVIGHMDRTLLDDADVVALARRGSIVEYDFFGIEHSNYWLGVVDIPNDWMRIRALRKLFDAGLGDRVVISHDISTRTRLQSLGGHGYGHILRNVVPLMRDRGFSQSEIDLLLLETPRRILTIGG

SEQ ID NO: 952 - protein, 349 aa, Artificial Sequence
  Synthetic
MAAAETGTGHARIETVLGPIAPAALGATLMHEHLLCDLTPPARRGQGLPEPEITLETIFDMGYRPGRYHGNHRLQDVALATREAAAFKADGGGAIVELTTGGIVPDPEGLAAIARGAGIHVVLGAGFYTENFLDAETLALSTEALTEITLGQLTEGAWGTKVRCGLIGEIGCSWPLTPFERRSLKSGARAQIATGAAITIHPGRDRAAPDEILDVLEAEGADLSRVVIGHMDRTLLDDADVVALARRGSIVEYDFFGIEHSNYWLGVVDIPNDWMRIRALRKLFDAGLGDRVVISHDITTRTRLQSLGGHGYGHILRNVVPLMRDRGFSQSEIDLLLLETPRRILTIGG

SEQ ID NO: 953 - protein, 349 aa, Artificial Sequence
  Synthetic
MAAAETGTGHARIETVLGPIAPAALGATLMHEHLLCDLTPPARRGQGLPEPEITLETIFDMGYRPGRYHGNHRLQDVALATREAAAFKADGGGAIVELTTGGIVPDPEGLAAIARGAGIHVVLGAGFYTENFLDAETLALSTEALTEITLGQLTEGAWGTKVRCGLIGEIGCSWPLTPFERRSLKSGARAQIATGAAITIHPGRDRAAPDEILDVLEAEGADLSRVVIGHMDRTLLDDADVVALARRGSIVEYDFFGIEHSNYWLGVVDIPNDWMRIRALRKLFDAGLGDRVVISHDIWTRTRLQSLGGHGYGHILRNVVPLMRDRGFSQSEIDLLLLETPRRILTIGG

SEQ ID NO: 954 - protein, 349 aa, Artificial Sequence
  Synthetic
MAAAETGTGHARIETVLGPIAPAALGATLMHEHLLCDLTPPARRGQGLPEPEITLETIFDMGYRPGRYHGNHRLQDVALATREAAAFKADGGGAIVELTTGGIVPDPEGLAAIARGAGIHVVLGAGFYTENFLDAETLALSTEALTEITLGQLTEGAWGTKVRCGLIGEIGCSWPLTPFERRSLKSGARAQIATGAAITIHPGRDRAAPDEILDVLEAEGADLSRVVIGHMDRTLLDDADVVALARRGSIVEYDFFGIEHSNYWLGVVDIPNDWMRIRALRKLFDAGLGDRVVISHDICTRTQLQSLGGHGYGHILRNVVPLMRDRGFSQSEIDLLLLETPRRILTIGG

SEQ ID NO: 955 - protein, 349 aa, Artificial Sequence
  Synthetic
MAAAETGTGHARIETVLGPIAPAALGATLMHEHLLCDLTPPARRGQGLPEPEITLETIFDMGYRPGRYHGNHRLQDVALATREAAAFKADGGGAIVELTTGGIVPDPEGLAAIARGAGIHVVLGAGFYTENFLDAETLALSTEALTEITLGQLTEGAWGTKVRCGLIGEIGCSWPLTPFERRSLKSGARAQIATGAAITIHPGRDRAAPDEILDVLEAEGADLSRVVIGHMDRTLLDDADVVALARRGSIVEYDFFGIEHSNYWLGVVDIPNDWMRIRALRKLFDAGLGDRVVISHDICTRTRLQSLGGHGFGHILRNVVPLMRDRGFSQSEIDLLLLETPRRILTIGG

SEQ ID NO: 956 - protein, 350 aa, Artificial Sequence
  Synthetic
MMAAAETGTGHARIETVLGPIAPAALGATLMHEHLLCDLTPPARRGQGLPEPEITLETIFDMGYRPGRYHGNHRLQDVALATREAAAFKADGGGAIVELTTGGIVPDPEGLAAIARGAGIHVVLGAGFYTENFLDAETLALSTEALTEITLGQLTEGAWGTKVRCGLIGEIGCSWPLTPFERRSLKSGARAQIATGAAITIHPGRDRAAPDEILDVLEAEGADLSRVVIGHMDRTLLDDADVVALARRGSIVEYDFFGIEHSNYWLGVVDIPNDWMRIRALRKLFDAGLGDRVVISHDICTRTRLQSLGGHGYGHILRNVVPLMRDRGFSQSEIDLLLLETPRRILTIGG
